(19) United States
(12) Patent Application Publication
(10) Pub. No.: US 2004/0068096 A1
(43) Pub. Date: Apr. 8, 2004

(54) Human single nucleotide polymorphisms in organic anion transport and multi-drug resistant proteins

(76) Inventors: Zenta Tsuchihashi, Pennington, NJ (US); Lester Hui, Fairfax, VA (US); Todd Kirchgessner, North Wales, PA (US)

Correspondence Address: STEPHEN B. DAVIS, BRISTOL-MYERS SQUIBB COMPANY, PATENT DEPARTMENT, P O BOX 4000, PRINCETON, NJ, 08543-4000, US

(21) Appl. No.: 10/252,155

(22) Filed: Sep. 20, 2002

Related U.S. Application Data
(60) Provisional application No. 60/324,172, filed on Sep. 21, 2001.
(60) Provisional application No. 60/333,700, filed on Nov. 27, 2001.

(51) Int. Cl. C07K 14/47; C12Q 1/68; C07H 21/04; C12P 21/02; C12N 5/06

(52) U.S. Cl. 530/350; 435/6; 435/69.1; 435/320.1; 435/325; 536/23.5

(57) ABSTRACT

The invention provides polynucleotides and polypeptides corresponding to novel gene sequences associated with the incidence of liver disease, and resistance to statin drugs, particularly pravastatin. The invention also provides polynucleotide fragments corresponding to the genomic and/or coding regions of these genes which comprise at least one polymorphic site per fragment. Allele-specific primers and probes which hybridize to these regions, and/or which comprise at least one polymorphic site are also provided. The polynucleotides, primers, and probes of the present invention are useful in phenotype correlations, paternity testing, medicine, and genetic analysis. Also provided are vectors, host cells, antibodies, and recombinant and synthetic methods for producing said polypeptides. The invention further relates to diagnostic and therapeutic methods for applying these novel polypeptides to the diagnosis, treatment, and/or prevention of various, diseases and/or disorders, particularly hepatic and cardiovascular diseases related to these polypeptides, such as liver disease and high cholesterol. The invention further relates to screening methods for identifying agonists and antagonists of the polynucleotides and polypeptides of the present invention.

[0001] This application claims benefit to provisional application U.S. Serial No. 60/324,172 filed Sep. 21, 2001; and to provisional application U.S. Serial No. 60/333,700 filed Nov. 27, 2001. The entire teachings of the referenced applications are incorporated herein by reference.

### FIELD OF THE INVENTION

[0002] The invention provides polynucleotides and polypeptides corresponding to novel gene sequences associated with the incidence of liver disease, and resistance to statin drugs, particularly pravastatin. The invention also provides polynucleotide fragments corresponding to the genomic and/or coding regions of these genes which comprise at least one polymorphic site per fragment. Allele-specific primers and probes which hybridize to these regions, and/or which comprise at least one polymorphic site are also provided. The polynucleotides, primers, and probes of the present invention are useful in phenotype correlations, paternity testing, medicine, and genetic analysis. Also provided are vectors, host cells, antibodies, and recombinant and synthetic methods for producing said polypeptides. The invention further relates to diagnostic and therapeutic methods for applying these novel polypeptides to the diagnosis, treatment, and/or prevention of various diseases and/or disorders, particularly hepatic and cardiovascular diseases related to these polypeptides, such as liver disease and high cholesterol. The invention further relates to screening methods for identifying agonists and antagonists of the polynucleotides and polypeptides of the present invention.

### BACKGROUND OF THE INVENTION

[0003] The genomes of all organisms undergo spontaneous mutation in the course of their continuing evolution, generating variant forms of progenitor nucleic acid sequences (Guselia, Ann. Rev. Biochem., 55:831-854 (1986). The variant form may confer an evolutionary advantage or disadvantage relative to a progenitor form, or may be neutral. In some instances, a variant form confers a lethal disadvantage and is not transmitted to subsequent generations of the organism. In other instances, a variant form confers an evolutionary advantage to the species and is eventually incorporated into the DNA of many or most members of the species and effectively becomes the progenitor form. In many instances, both progenitor and variant form(s) survive and co-exist in a species population. The coexistence of multiple forms of a sequence gives rise to polymorphisms.

[0004] Several different types of polymorphism have been reported. A restriction fragment length polymorphism (RFLP) is a variation in DNA sequence that alters the length of a restriction fragment (Botstein et al., Am. J. Hum. Genet, 32:314-331 (1980). The restriction fragment length polymorphism may create or delete a restriction site, thus changing the length of the restriction fragment. RFLPs have been widely used in human and animal genetic analyses (see WO 90/13668; W090/11369; Donis-Keller, Cell , 51:319-337 (1987); Lander et al., Genetics 121,85-99 (1989)). When a heritable trait can be linked to a particular RFLP, the presence of the RFLP in an individual can be used to predict the likelihood that the animal will also exhibit the trait.

[0005] Other polymorphisms take the form of short tandem repeats (STRs) that include tandem di-, tri- and tetra-nucleotide repeated motifs. These tandem repeats are also referred to as variable number tandem repeat (VNTR) polymorphisms. VNTRs have been used in identity and paternity analysis (U.S. Pat. No. 5,075,217; Annour et al., FEBSLett. 307, 113-115 (1992); Horn et al., WO 91/14003; Jeffreys, EP 370,719), and in a large number of genetic mapping studies.

[0006] Other polymorphisms take the form of single nucleotide variations between individuals of the same species. Such polymorphisms are far more frequent than RFLPs, STRs and VNTRs. Some single nucleotide polymorphisms (SNP) occur in protein-coding nucleic acid sequences (coding sequence SNP (cSNP)), in which case, one of the polymorphic forms may give rise to the expression of a defective or otherwise variant protein and, potentially, a genetic disease. Examples of genes in which polymorphisms within coding sequences give rise to genetic disease include˜globin (sickle cell anemia), apoE4 (Alzheimer's Disease), Factor V Leiden (thrombosis), and CFTR (cystic fibrosis). cSNPs can alter the codon sequence of the gene and therefore specify an alternative amino acid. Such changes are called “missense” when another amino acid is substituted, and “nonsense” when the alternative codon specifies a stop signal in protein translation. When the cSNP does not alter the amino acid specified the cSNP is called “silent”.

[0007] Other single nucleotide polymorphisms occur in noncoding regions. Some of these polymorphisms may also result in defective protein expression (e.g., as a result of defective splicing). Other single nucleotide polymorphisms have no phenotypic effects. Single nucleotide polymorphisms can be used in the same manner as RFLPs and VNTRs, but offer several advantages.

[0008] Single nucleotide polymorphisms occur with greater frequency and are spaced more uniformly throughout the genome than other forms of polymorphism. The greater frequency and uniformity of single nucleotide polymorphisms means that there is a greater probability that such a polymorphism will be found in close proximity to a genetic locus of interest than would be the case for other polymorphisms. The different forms of characterized single nucleotide polymorphisms are often easier to distinguish than other types of polymorphism (e.g., by use of assays employing allele-specific hybridization probes or primers).

[0009] Only a small percentage of the total repository of polymorphisms in humans and other organisms has been identified. The limited number of polymorphisms identified to date is due to the large amount of work required for their detection by conventional methods. For example, a conventional approach to identifying polymorphisms might be to sequence the same stretch of DNA in a population of individuals by dideoxy sequencing. In this type of approach, the amount of work increases in proportion to both the length of sequence and the number of individuals in a population and becomes impractical for large stretches of DNA or large numbers of persons.

[0010] The liver functions in the clearance of a large variety of metabolic products, drugs and other xenobiotics by transporting them from the circulation into hepatocytes and then from the hepatocyte into the bile. Compounds must first cross the sinusoidal or basolateral membrane and, on the opposite side of the cell, must cross the canilicular membrane into the bile. Several classes of transport systems have been described that mediate the sinusoidal transport processes including the Na+/taurocholate cotransporter polypeptide, NTCP, in rat and human liver (Hagenbuch, B., et al. (1991) Proc. Natl. Acad. Sci. USA 88:10629-33; Hagenbuch, B. et al., (1994) J. Clin. Invest. 93:1326-31) and a family of organic anion transporting polypeptides (OATPs) that are principally expressed in liver, kidney and brain, and transport a broad spectrum of substrates in a sodium-independent manner (Meier, P. J., et al., (1997) Hepatology 26:1667-77; Wolkoff, A. W., (1996) Semin. Liver Dis. 16:121-127). The distribution of this latter family of transporters in liver, kidney and choroid plexus in the brain is thought to reflect common physiological requirements of these organs for the clearance of a multitide of organic anions. OATP isoforms identified in the rat include roatp1 (Jacquemin, E., et al., (1994) Proc. Natl. Acad. Sci. USA 91:133-37); roatp2 (Noe, B. A., et al., (1997) Proc. Natl. Acad. Sci. USA 94:10346-50; and roatp3 (Abe, T., et al., (1998) J. Biol. Chem. 273:11395-401). A total of 5 human OATPs, with documented activity in transfection experiments, have been described. Three of these have been characterized with respect to substrate specificities, tissue distribution and cellular localization. They include OATP1 (Kullak-Ublick, G. A., et al., (1995) Gastroenterology, 109:1274-1282), OATP2/LST1 (Hsiang, B. et al., (1999) J. Biol. Chem., 274:37161-37168; Abe, T. et al., (1999) J. Biol. Chem., 274:17159-17163), and OATP8/LST-2 (Konig, J. et al. (2000) J. Biol. Chem., 275: 23161-23168; Abe, T. et al., (2001) Gastroenterology, 120:1689-1699).

[0011] In addition to bile acids, OATPs are known to transport a variety of other endogenous substances. The known endogenous substrates of OATP2 are cholate, taurocholate, thyroid hormones T3 and T4, DHEAS, estradiol-17beta-glucuronide, estrone-3-sulfate, prostaglandin E2, thromboxane B2, leukotriene C4, leukotriene E4, and bilirubin and its conjugates. Known drugs that are transported by OATP2 include pravastatin, simvastatin, atorvastatin, and lovastatin (Hsiang, B. et al., (1999) J. Biol. Chem., 274:37161-37168; Abe, T. et al., (1999) J. Biol. Chem., 274:17159-17163; Konig, J. et al., (2000) Am. J. Physiol., 278:G156-G164; Cui, Y. et al., (2001) J. Biol. Chem. 276:9626-9630)

[0012] A number of transporters of the multi-drug resistant protein, or MRP, class have been characterized that mediate the transport of endogenous substances and drugs out of cells. Their principal substrates are lipophillic substances conjugated to glutathione, glucuronate, or sulfate, although non-conjugated compounds are also known to be transported. This is a therapeutically important protein family since MRPs confer resistance to drugs due to their ability to rid cells of xenobiotics. In the case of chemotherapeutics, they limit the efficacy of anti-cancer drugs. In other cases they provide a route of drug elimination from the body. An example of the latter is the cMOAT (also known as MRP2, cMRP and ABCC2) mediated transport of pravastatin across the canilicular membrane of the hepatocyte and out of the liver (Masayo, Y. et al., (1997) Drug Metab Dispos., 25:1123-1129). Many other substrates of cMOAT are known including leukotriene C4, leukotriene D4, leukotriene E4, conjugated bilirubin, 17β-glucuronosyl estradiol, ochratoxin A, glucuronosyl nafenopin, glucuronosyl grepafloxacin, and temocaprilat (for reviews of the MRP family and subsrate specificities see Koenig, J. et al.,(1999) Biochimica et Biophysica Acta, 1461:377-394; Borst, P. et al., (1999) Biochimica et Biophysica Acta, 1461:347-357). Chemotherapeutic drugs that have been identified as substrates for cMOAT include methotrexate, doxirubicin, cisplatin, CPT-11, SN-38, vincristine, and etoposide (Kool, M., et al., (1997) Cancer Res. 57:3537-3547; Koike, K. et al., (1997 Cancer Res. 57: 5475-5479; Cui, Y. et al., (1999) Mol. Pharmacol. 55:929-937).

[0013] Lipid-lowering drugs, in particular statin treatments, have been shown to reduce the incidence of initial and recurrent coronary heart disease (CHD) events within several years of initiating therapy. This effect can be clinically detected within the first 1 to 2 years in randomized trials.

[0014] Recent observational and clinical trial data suggest that lipid-lowering therapy initiated at the time of an acute coronary event can reduce recurrent events, and possibly all-cause mortality, in a much shorter period of time. The possible mechanisms by which this benefit occurs include the effect of reduced lipoprotein levels, as well as an independent effect of statins on endothelial function. Statins improve endothelial-dependent flow-mediated vasodilation by increasing the bioavailability of nitric oxide. Statins have also been shown to stabilize and decrease the formation of arterial plaques by modulating the inflammatory response within the vessel wall.

[0015] Polymorphisms in the human OATP2 gene may cause alterations in OATP2 expression and/or activity and, consequently, affect the rate of transport of its substrates into the liver. Known substrates for OATP2 are (1) the bile acid taurocholate, (2) thyroid hormones (thyroxine & triiodothyronine), (3) DHEAS, (4) estradiol-17β-glucuronide, (5) estrone-3-sulfate, (6) prostaglandin E2, (7) thromboxane B2, (8) leukotriene C4, (9) leukotiene E4, (10) bilirubin and its glucuronate conjugates, and (11) HMG-CoA reductase inhibitors including pravastatin, simvastatin, lovastatin, and atorvastatin. Thus, such polymorphisms may genetically predispose certain individuals to an increased risk of adverse consequences from the enhanced or impaired hepatic uptake of these substances. This could include, for example, drug or xenobiotic induced cholestasis due to decreased bile acid uptake, and hyperbilirubinemia due to the decreased uptake of conjugated and unconjugated bilirubin,. In addition, polymorphisms that result in decreased OATP2 levels could also pre-dispose patients to decreased responses to cholesterol lowering drugs (statins) such as pravastatin, simvastatin, lovastatin, pitivastatin, cerivastatin, and rousuvastatin. Such polymorphisms are expected to show a significant difference in allele frequency between healthy individuals and diseased (e.g. cholestatic) subjects or between drug (e.g. pravastatin) responsive and non-responsive subjects.

[0016] Polymorphisms in the human cMOAT gene may cause alterations in MRP2 expression and/or activity and, consequently, affect the rate of transport of its substrates out of cells. The cells or tissues that cMOAT resides include the liver, kidney, and intestine and in a variety of tumor cells. The latter develop so-called MDR drug resistance to cytotoxic anti-cancer drugs by virture of upregulating the expression of cMOAT. Such polymorphisms may genetically predispose certain individuals to an increased risk of adverse consequences from the enhanced or impaired uptake of cMOAT substrates. This could include, for example, drug or xenobiotic induced cholestasis due to decreased bile acid transport out of the liver, and hyperbilirubinemia due to the decreased hepatic transport of conjugated and unconjugated bilirubin. In addition, polymorphisms that result in increased or decreased cMOAT levels could also pre-dispose patients to atypical responses to cholesterol lowering drugs (statins) such as pravastatin. For example, patients with cMOAT polymorphisms may have enhanced or diminished export of statins from the liver and, thus have decreased or increased plasma cholesterol lowering responses to these drugs. Similarly, patients with polymorphisms in the human cMOAT gene may also exhibit atypical responses to cytotoxic anti-cancer therapy. For example, polymorphisms that enhance its activity may respond less well to drugs that are substrates for cMOAT.

### SUMMARY OF THE INVENTION

[0017] The present invention relates to the identification of polymorphisms which can predispose individuals to disease, by resequencing large numbers of genes in a large number of individuals. Various genes from a number of individuals have been resequenced as described herein, and SNPs in these genes have been discovered (see Tables I, IV, V, or VI). Some of these SNPs are cSNPs which specify a different amino acid sequence (described as “missense” under the ‘Mutation Type’ column of Tables IV, V, or VI); some of the SNPs are silent cSNPs (shown as mutation type “silent” under the ‘Mutation Type’ column of Tables IV, V, or VI), and some of these cSNPs may specify a stop signal in protein translation. Some of the identified SNPs were located in non-coding regions (described as “non-CDS” in the ‘Mutation Type’ column of Tables IV, V, or VI).

[0018] The invention relates to a nucleic acid molecule which comprises a single nucleotide polymorphism at a specific location. In a particular embodiment the invention relates to the variant allele of a gene having a single nucleotide polymorphism, which variant allele differs from a reference allele by one nucleotide at the site(s) identified in Tables I, IV, V, or VI. Complements of these nucleic acid segments are also provided. The segments can be DNA or RNA, and can be double- or single-stranded. Segments can be, for example, 5-10,5-15, 10-20,5-25,10-30, 10-50 or 10-100 bases long.

[0019] The invention further provides allele-specific oligonucleotides that hybridize to a nucleic acid molecule comprising a single nucleotide polymorphism or to the complement of the nucleic acid molecule. These oligonucleotides can be probes or primers.

[0020] The invention further provides oligonucleotides that may be used to amplify across a single nucleotide polymorphic site of the present invention. The invention further provides oligonucleotides that may be used to sequence said amplified sequence. The invention further provides a method of analyzing a nucleic acid from a DNA sample using said amplification and sequencing primers to assess whether said sample contains the reference or variant base (allele) at the polymorphic site, comprising the steps of amplifying a sequence using appropriate PCR primers for amplifying across a polymorphic site, sequencing the resulting amplified product using appropriate sequencing primers to sequence said product, and determining whether the variant or reference base is present at the polymorphic site.

[0021] The invention further provides a method of analyzing a nucleic acid from DNA sample(s) from various ethnic populations using said amplification and sequencing primers to assess whether said sample(s) contain the reference or variant base (allele) at the polymorphic site in an effort to identify individuals with low hepatic statin uptake comprising the steps of amplifying a sequence using appropriate PCR primers for amplifying across a polymorphic site, sequencing the resulting amplified product using appropriate sequencing primers to sequence said product, and determining whether the variant or reference base is present at the polymorphic site, and optionally determining the statistical association between either the reference or variant allele at the polymorphic site(s) to the incidence low hepatic statin uptake.

[0022] The invention further provides a method of analyzing a nucleic acid from DNA sample(s) from various ethnic populations using said amplification and sequencing primers to assess whether said sample(s) contain the reference or variant base (allele) at the polymorphic site in an effort to identify individuals most likely to be non-responsive, or less responsive, to statin administration comprising the steps of amplifying a sequence using appropriate PCR primers for amplifying across a polymorphic site, sequencing the resulting amplified product using appropriate sequencing primers to sequence said product, and determining whether the variant or reference base is present at the polymorphic site, and optionally determining the statistical association between either the reference or variant allele at the polymorphic site(s) to the incidence of non-responsive, or less responsive statin responses.

[0023] The invention further provides oligonucleotides that may be used to genotype DNA sample(s) to assess whether said sample(s) contain the reference or variant base (allele) at the polymorphic site(s). The invention provide a method of using oligonucleotides that may be used to genotype a DNA sample to assess whether said sample contains the reference or variant base (allele) at the polymorphic site comprising the steps of amplifying a sequence using appropriate PCR primers for amplifying across a polymorphic site, subjecting the product of said amplification to a genetic bit analysis (GBA) reaction, and analyzing the result.

[0024] The invention provides a method of using oligonucleotides that may be used to genotype DNA sample(s) to identify individual(s) that may be at risk of developing drug interactions upon administration of at least one statin, or other drug, to assess whether said sample(s) contains the reference or variant base (allele) at the polymorphic site(s) comprising the steps of amplifying a sequence using appropriate PCR primers for amplifying across a polymorphic site, subjecting the product of said amplification to a genetic bit analysis (GBA) reaction, analyzing the result, and optionally determining the statistical association between either the reference or variant allele at the polymorphic site(s) to the incidence of said drug intereaction.

[0025] The invention provides a method of using oligonucleotides that may be used to genotype DNA sample(s) to identify ethnic population(s) that may be at risk of developing drug interactions upon administration of at least one statin, or other drug, to assess whether said sample(s) contain the reference or variant base (allele) at the polymorphic site comprising the steps of amplifying a sequence using appropriate PCR primers for amplifying across a polymorphic site, subjecting the product of said amplification to a genetic bit analysis (GBA) reaction, analyzing the result, and optionally determining the statistical association between either the reference or variant allele at the polymorphic site(s) to the incidence of said drug interaction.

[0026] The invention further provides a method of analyzing a nucleic acid from an individual. The method allows the determination of whether the reference or variant base is present at any one, or more, of the polymorphic sites shown in Tables I, IV, V, or VI. Optionally, a set of bases occupying a set of the polymorphic sites shown in Tables I, IV, V, or VI is determined. This type of analysis can be performed on a number of individuals, who are also tested (previously, concurrently or subsequently) for the presence of a disease phenotype. The presence or absence of disease phenotype is then correlated with a base or set of bases present at the polymorphic site or sites in the individuals tested.

[0027] Thus, the invention further relates to a method of predicting the presence, absence, likelihood of the presence or absence, or severity of a particular phenotype or disorder associated with a particular genotype. The method comprises obtaining a nucleic acid sample from an individual and determining the identity of one or more bases (nucleotides) at specific (e.g., polymorphic) sites of nucleic acid molecules described herein, wherein the presence of a particular base at that site is correlated with a specified phenotype or disorder, thereby predicting the presence, absence, likelihood of the presence: or absence, or severity of the phenotype or disorder in the individual.

[0028] The present invention also relates to recombinant vectors, which include the isolated nucleic acid molecules of the present invention, and to host cells containing the recombinant vectors, as well as to methods of making such vectors and host cells, in addition to their use in the production of polypeptides or peptides provided herein using recombinant techniques. Synthetic methods for producing the polypeptides and polynucleotides of the present invention are provided. Also provided are diagnostic methods for detecting diseases, disorders, and/or conditions related to the polypeptides and polynucleotides provided herein, and therapeutic methods for treating such diseases, disorders, and/or conditions. The invention further relates to screening methods for identifying binding partners of the polypeptides.

[0029] The invention further provides an isolated polypeptide having an amino acid sequence encoded by a polynucleotide described herein.

[0030] The invention further relates to a method for genotyping an individual comprising the steps of (a) obtaining a nucleic acid sample(s) from said individual; (b) determining the nucleotide present at least one polymorphic position, and (c) comparing said at least one polymorphic position with a known data set.

[0031] The invention further relates to a method for genotyping an individual comprising the steps of (a) obtaining a nucleic acid sample(s) from said individual; and (b) determining the nucleotide present at least one polymorphic position, wherein the nucleotide present at the at least one polmorphic position is associated with a specific disease, disorder, and/or condition as described herein.

### BRIEF DESCRIPTION OF THE FIGURES/DRAWINGS

[0032] FIGS. 1A-C show the polynucleotide sequence (SEQ ID NO:1) and deduced amino acid sequence (SEQ ID NO:2) of the wild type human organic anion transport protein, OATP2, also referred to as solute carrier family 21 member 6 (HGNC NO:SLC21A6; Genbank Accession No: gi|6636521). The standard one-letter abbreviation for amino acids is used to illustrate the deduced amino acid sequence. The polynucleotide sequence contains a sequence of 2830 nucleotides (SEQ ID NO:1), encoding a polypeptide of 691 amino acids (SEQ ID NO:2).

[0033] FIGS. 2A-F show the polynucleotide sequence (SEQ ID NO:3) and deduced amino acid sequence (SEQ ID NO:2) of the wild type human organic anion transport protein, cMOAT, also referred to as ATP-binding cassette sub-family C member 2 (HGNC NO: ABCC2; Genbank Accession No: gi|1574997). The standard one-letter abbreviation for amino acids is used to illustrate the deduced amino acid sequence. The polynucleotide sequence contains a sequence of 5300 nucleotides (SEQ ID NO:3), encoding a polypeptide of 1545 amino acids (SEQ ID NO:4).

[0034] FIGS. 3A-C show the polynucleotide sequence (SEQ ID NO:5) and deduced amino acid sequence (SEQ ID NO:6) of the human organic anion transport OATP2 protein variant, SLC21A6-S137S (SNP_ID: PS100s1) of the present invention. The standard one-letter abbreviation for amino acids is used to illustrate the deduced amino acid sequence. The polynucleotide sequence contains a sequence of 2830 nucleotides (SEQ ID NO:5), encoding a polypeptide of 691 amino acids (SEQ ID NO:6). The predicted ‘G’ to ‘A’ polynucleotide polymorphism is located at nucleic acid position 545 of SEQ ID NO:5 and is represented in bold. The polymorphism is a silent mutation and does not change the amino acid sequence of the encoded polypeptide.

[0035] FIGS. 4A-C show the polynucleotide sequence (SEQ ID NO:7) and deduced amino acid sequence (SEQ ID NO:8) of the human organic anion transport OATP2 protein variant, SLC21A6-P155T (SNP_ID: PS100s2) of the present invention. The standard one-letter abbreviation for amino acids is used to illustrate the deduced amino acid sequence. The polynucleotide sequence contains a sequence of 2830 nucleotides (SEQ ID NO:7), encoding a polypeptide of 691 amino acids (SEQ ID NO:8). The predicted ‘C’ to ‘A’ polynucleotide polymorphism is located at nucleic acid position 597 of SEQ ID NO:7 and is represented in bold. The polymorphism is a missense mutation resulting in a change in an encoding amino acid from ‘P’ to ‘T’ at amino acid position 155 of SEQ ID NO:8 and is represented by underlining.

[0036] FIGS. 5A-C show the polynucleotide sequence (SEQ ID NO:9) and deduced amino acid sequence (SEQ ID NO: 10) of the human organic anion transport OATP2 protein variant, SLC21A6-D130Y (SNP_ID: PS100s9) of the present invention. The standard one-letter abbreviation for amino acids is used to illustrate the deduced amino acid sequence. The polynucleotide sequence contains a sequence of 2830 nucleotides (SEQ ID NO:9), encoding a polypeptide of 691 amino acids (SEQ ID NO:10). The predicted ‘G’ to ‘T’ polynucleotide polymorphism is located at nucleic acid position 522 of SEQ ID NO:9 and is represented in bold. The polymorphism is a missense mutation resulting in a change in an encoding amino acid from ‘D’ to ‘Y’ at amino acid position 130 of SEQ ID NO:10 and is represented by underlining.

[0037] FIGS. 6A-C show the polynucleotide sequence (SEQ ID NO:11) and deduced amino acid sequence (SEQ ID NO:12) of the human organic anion transport OATP2 protein variant, SLC21A6-G488A (SNP_ID: PS100s23) of the present invention. The standard one-letter abbreviation for amino acids is used to illustrate the deduced amino acid sequence. The polynucleotide sequence contains a sequence of 2830 nucleotides (SEQ ID NO:11), encoding a polypeptide of 691 amino acids (SEQ ID NO:12). The predicted ‘G’ to ‘C’ polynucleotide polymorphism is located at nucleic acid position 1597 of SEQ ID NO:11 and is represented in bold. The polymorphism is a missense mutation resulting in a change in an encoding amino acid from ‘G’ to ‘A’ at amino acid position 488 of SEQ ID NO:12 and is represented by underlining.

[0038] FIGS. 7A-C show the polynucleotide sequence (SEQ ID NO:13) and deduced amino acid sequence (SEQ ID NO:14) of the human organic anion transport OATP2 protein variant, SLC21A6-V416V (SNP_ID: PS100s25) of the present invention. The standard one-letter abbreviation for amino acids is used to illustrate the deduced amino acid sequence. The polynucleotide sequence contains a sequence of 2830 nucleotides (SEQ ID NO:13), encoding a polypeptide of 691 amino acids (SEQ ID NO:14). The predicted ‘G’ to ‘A’ polynucleotide polymorphism is located at nucleic acid position 1382 of SEQ ID NO:13 and is represented in bold. The polymorphism is a silent mutation and does not change the amino acid sequence of the encoded polypeptide.

[0039] FIGS. 8A-C show the polynucleotide sequence (SEQ ID NO:15) and deduced amino acid sequence (SEQ ID NO:16) of the human organic anion transport OATP2 protein variant, SLC21A6-F400K (SNP_ID: PS100s26) of the present invention. The standard one-letter abbreviation for amino acids is used to illustrate the deduced amino, acid sequence. The polynucleotide sequence contains a sequence of 2830 nucleotides (SEQ ID NO:15), encoding a polypeptide of 691 amino acids (SEQ ID NO:16). The predicted ‘C’ to ‘G’ polynucleotide polymorphism is located at nucleic acid position 1334 of SEQ ID NO:15 and is represented in bold. The polymorphism is a missense mutation resulting in a change in an encoding amino acid from ‘F’ to ‘K’ at amino acid position 400 of SEQ ID NO:16 and is represented by underlining.

[0040] FIGS. 9A-C show the polynucleotide sequence (SEQ ID NO:17) and deduced amino acid sequence (SEQ ID NO:18) of the human organic anion transport OATP2 protein variant, SLC21A6-V174A (SNP_ID: PS100s29) of the present invention. The standard one-letter abbreviation for amino acids is used to illustrate the deduced amino acid sequence. The polynucleotide sequence contains a sequence of 2830 nucleotides (SEQ ID NO:17), encoding a polypeptide of 691 amino acids (SEQ ID NO:18). The predicted ‘T’ to ‘C’ polynucleotide polymorphism is located at nucleic acid position 655 of SEQ ID NO:17 and is represented in bold. The polymorphism is a missense mutation resulting in a change in an encoding amino acid from ‘V’ to ‘A’ at amino acid position 174 of SEQ ID NO:18 and is represented by underlining.

[0041] FIGS. 10A-C show the polynucleotide sequence (SEQ ID NO:19) and deduced amino acid sequence (SEQ ID NO:20) of the human organic anion transport OATP2 protein variant, SLC21A6-K191L (SNP_ID: PS100s30) of the present invention. The standard one-letter abbreviation for amino acids is used to illustrate the deduced amino acid sequence. The polynucleotide sequence contains a sequence of 2830 nucleotides (SEQ ID NO:19), encoding a polypeptide of 691 amino acids (SEQ ID NO:20). The predicted ‘T’ to ‘C’ polynucleotide polymorphism is located at nucleic acid position 705 of SEQ ID NO:19 and is represented in bold. The polymorphism is a missense mutation resulting in a change in an encoding amino acid from ‘K’ to ‘L’ at amino acid position 191 of SEQ ID NO:20 and is represented by underlining.

[0042] FIGS. 11A-C show the polynucleotide sequence (SEQ ID NO:21) and deduced amino acid sequence (SEQ ID NO:22) of the human organic anion transport OATP2 protein variant, SLC21A6-F199F (SNP_ID: PS100s31) of the present invention. The standard one-letter abbreviation for amino acids is used to illustrate the deduced amino acid sequence. The polynucleotide sequence contains a sequence of 2830 nucleotides (SEQ ID NO:21), encoding a polypeptide of 691 amino acids (SEQ ID NO:22). The predicted ‘C’ to ‘T’ polynucleotide polymorphism is located at nucleic acid position 731 of SEQ ID NO:21 and is represented in bold. The polymorphism is a silent mutation and does not change the amino acid sequence of the encoded polypeptide.

[0043] FIGS. 12A-F show the polynucleotide sequence (SEQ ID NO:23) and deduced amino acid sequence (SEQ ID NO:24) of the human organic anion transport cMOAT protein variant, ABCC2-E1188V (SNP_ID: PS101s1) of the present invention. The standard one-letter abbreviation for amino acids is used to illustrate the deduced amino acid sequence. The polynucleotide sequence contains a sequence of 5300 nucleotides (SEQ ID NO:23), encoding a polypeptide of 1545 amino acids (SEQ ID NO:24). The predicted ‘A’ to ‘T’ polynucleotide polymorphism is located at nucleic acid position 3664 of SEQ ID NO:23 and is represented in bold. The polymorphism is a missense mutation resulting in a change in an encoding amino acid from ‘E’ to ‘V’ at amino acid position 1188 of SEQ ID NO:24 and is represented by underlining.

[0044] FIGS. 13A-F show the polynucleotide sequence (SEQ ID NO:25) and deduced amino acid sequence (SEQ ID NO:26) of the human organic anion transport cMOAT protein variant, ABCC2-I13241 (SNP_ID: PS101s2) of the present invention. The standard one-letter abbreviation for amino acids is used to illustrate the deduced amino acid sequence. The polynucleotide sequence contains a sequence of 5300 nucleotides (SEQ ID NO:25), encoding a polypeptide of 1545 amino acids (SEQ ID NO:26). The predicted ‘C’ to ‘T’ polynucleotide polymorphism is located at nucleic acid position 4073 of SEQ ID NO:25 and is represented in bold. The polymorphism is a silent mutation and does not change the amino acid sequence of the encoded polypeptide.

[0045] FIGS. 14A-F show the polynucleotide sequence (SEQ ID NO:27) and deduced amino acid sequence (SEQ ID NO:28) of the human organic anion transport cMOAT protein variant, ABCC2-L1370L (SNP_ID: PS101s4) of the present invention. The standard one-letter abbreviation for amino acids is used to illustrate the deduced amino acid sequence. The polynucleotide sequence contains a sequence of 5300 nucleotides (SEQ ID NO:27), encoding a polypeptide of 1545 amino acids (SEQ ID NO:28). The predicted ‘C’ to ‘T’ polynucleotide polymorphism is located at nucleic acid position 4211 of SEQ ID NO:27 and is represented in bold. The polymorphism is a silent mutation and does not change the amino acid sequence of the encoded polypeptide.

[0046] FIGS. 15A-F show the polynucleotide sequence (SEQ ID NO:29) and deduced amino acid sequence (SEQ ID NO:30) of the human organic anion transport cMOAT protein variant, ABCC2-A1354A (SNP_ID: PS101s5) of the present invention. The standard one-letter abbreviation for amino acids is used to illustrate the deduced amino acid sequence. The polynucleotide sequence contains a sequence of 5300 nucleotides (SEQ ID NO:29), encoding a polypeptide of 1545 amino acids (SEQ ID NO:30). The predicted ‘C’ to ‘T’ polynucleotide polymorphism is located at nucleic acid position 4163 of SEQ ID NO:29 and is represented in bold. The polymorphism is a silent mutation and does not change the amino acid sequence of the encoded polypeptide.

[0047] FIG. 16A-F show the polynucleotide sequence (SEQ ID NO:31) and deduced amino acid sequence (SEQ ID NO:32) of the human organic anion transport cMOAT protein variant, ABCC2-E1470E (SNP_ID: PS101s6) of the present invention. The standard one-letter abbreviation for amino acids is used to illustrate the deduced amino acid sequence. The polynucleotide sequence contains a sequence of 5300 nucleotides (SEQ ID NO:31), encoding a polypeptide of 1545 amino acids (SEQ ID NO:32). The predicted ‘G’ to ‘A’ polynucleotide polymorphism is located at nucleic acid position 4511 of SEQ ID NO:31 and is represented in bold. The polymorphism is a silent mutation and does not change the amino acid sequence of the encoded polypeptide.

[0048] FIG. 17A-F show the polynucleotide sequence (SEQ ID NO:33) and deduced amino acid sequence (SEQ ID NO:34) of the human organic anion transport cMOAT protein variant, ABCC2-H1496H (SNP_ID: PS101s7) of the present invention. The standard one-letter abbreviation for amino acids is used to illustrate the deduced amino acid sequence. The polynucleotide sequence contains a sequence of 5300 nucleotides (SEQ ID NO:33), encoding a polypeptide of 1545 amino acids (SEQ ID NO:34). The predicted ‘T’ to ‘C’ polynucleotide polymorphism is located at nucleic acid position 4589 of SEQ ID NO:33 and is represented in bold. The polymorphism is a silent mutation and does not change the amino acid sequence of the encoded polypeptide.

[0049] FIG. 18A-F show the polynucleotide sequence (SEQ ID NO:35) and deduced amino acid sequence (SEQ ID NO:36) of the human organic anion transport cMOAT protein variant, ABCC2-R1181L (SNP_ID: PS101s10) of the present invention. The standard one-letter abbreviation for amino acids is used to illustrate the deduced amino acid sequence. The polynucleotide sequence contains a sequence of 5300 nucleotides (SEQ ID NO:35), encoding a polypeptide of 1545 amino acids (SEQ ID NO:36). The predicted ‘G’ to ‘T’ polynucleotide polymorphism is located at nucleic acid position 3643 of SEQ ID NO:35 and is represented in bold. The polymorphism is a missense mutation resulting in a change in an encoding amino acid from ‘R’ to ‘L’ at amino acid position 1181 of SEQ ID NO:36 and is represented by underlining.

[0050] FIG. 19A-F show the polynucleotide sequence (SEQ ID NO:37) and deduced amino acid sequence (SEQ ID NO:38) of the human organic anion transport cMOAT protein variant, ABCC2-K961R (SNP_ID: PS101s11) of the present invention. The standard one-letter abbreviation for amino acids is used to illustrate the deduced amino acid sequence. The polynucleotide sequence contains a sequence of 5300 nucleotides (SEQ ID NO:37), encoding a polypeptide of 1545 amino acids (SEQ ID NO:38). The predicted ‘A’ to ‘G’ polynucleotide polymorphism is located at nucleic acid position 2983 of SEQ ID NO:37 and is represented in bold. The polymorphism is a missense mutation resulting in a change in an encoding amino acid from ‘K’ to ‘R’ at amino acid position 961 of SEQ ID NO:38 and is represented by underlining.

[0051] FIG. 20A-F show the polynucleotide sequence (SEQ ID NO:39) and deduced amino acid sequence (SEQ ID NO:40) of the human organic anion transport cMOAT protein variant, ABCC2-V86V (SNP_ID: PS101s13) of the present invention. The standard one-letter abbreviation for amino acids is used to illustrate the deduced amino acid sequence. The polynucleotide sequence contains a sequence of 5300 nucleotides (SEQ ID NO:39), encoding a polypeptide of 1545 amino acids (SEQ ID NO:40). The predicted ‘A’ to ‘G’ polynucleotide polymorphism is located at nucleic acid position 359 of SEQ ID NO:39 and is represented in bold. The polymorphism is a silent mutation and does not change the amino acid sequence of the encoded polypeptide.

[0052] FIGS. 21A-F show the polynucleotide sequence (SEQ ID NO:41) and deduced amino acid sequence (SEQ ID NO:42) of the human organic anion transport cMOAT protein variant, ABCC2-1670T (SNP_ID: PS101s22) of the present invention. The standard one-letter abbreviation for amino acids is used to illustrate the deduced amino acid sequence. The polynucleotide sequence contains a sequence of 5300 nucleotides (SEQ ID NO:41), encoding a polypeptide of 1545 amino acids (SEQ ID NO:42). The predicted ‘T’ to ‘C’ polynucleotide polymorphism is located at nucleic acid position 2110 of SEQ ID NO:41 and is represented in bold. The polymorphism is a missense mutation resulting in a change in an encoding amino acid from ‘I’ to ‘T’ at amino acid position 670 of SEQ ID NO:42 and is represented by underlining.

[0053] FIGS. 22A-F show the polynucleotide sequence (SEQ ID NO:43) and deduced amino acid sequence (SEQ ID NO:44) of the human organic anion transport cMOAT protein variant, ABCC2-V4171 (SNP_ID: PS101s23) of the present invention. The standard one-letter abbreviation for amino acids is used to illustrate the deduced amino acid sequence. The polynucleotide sequence contains a sequence of 5300 nucleotides (SEQ ID NO:43), encoding a polypeptide of 1545 amino acids (SEQ ID NO:44). The predicted ‘G’ to ‘A’ polynucleotide polymorphism is located at nucleic acid position 1350 of SEQ ID NO:43 and is represented in bold. The polymorphism is a missense mutation resulting in a change in an encoding amino acid from ‘V’ to ‘I’ at amino acid position 417 of SEQ ID NO:44 and is represented by underlining.

[0054] FIGS. 23A-F show the polynucleotide sequence (SEQ ID NO:45) and deduced amino acid sequence (SEQ ID NO:46) of the human organic anion transport cMOAT protein variant, ABCC2-L407K (SNP_ID: PS101s24) of the present invention. The standard one-letter abbreviation for amino acids is used to illustrate the deduced amino acid sequence. The polynucleotide sequence contains a sequence of 5300 nucleotides (SEQ ID NO:45), encoding a polypeptide of 1545 amino acids (SEQ ID NO:46). The predicted ‘C’ to ‘T’ polynucleotide polymorphism is located at nucleic acid position 1320 of SEQ ID NO:45 and is represented in bold. The polymorphism is a missense mutation resulting in a change in an encoding amino acid from ‘L’ to ‘K’ at amino acid position 407 of SEQ ID NO:46 and is represented by underlining.

[0055] FIG. 24A-F show the polynucleotide sequence (SEQ ID NO:47) and deduced amino acid sequence (SEQ ID NO:48) of the human organic anion transport cMOAT protein variant, ABCC2-S978S (SNP_ID: PS101s32) of the present invention. The standard one-letter abbreviation for amino acids is used to illustrate the deduced amino acid sequence. The polynucleotide sequence contains a sequence of 5300 nucleotides (SEQ ID NO:47), encoding a polypeptide of 1545 amino acids (SEQ ID NO:48). The predicted ‘G’ to ‘A’ polynucleotide polymorphism is located at nucleic acid position 3035 of SEQ ID NO:47 and is represented in bold. The polymorphism is a silent mutation and does not change the amino acid sequence of the encoded polypeptide.

[0056] FIGS. 25A-C show the polynucleotide sequence (SEQ ID NO:289) and deduced amino acid sequence (SEQ ID NO:290) of the human organic anion transport OATP2 protein comprising, or alternatively consisting of, one or more of the predicted polynucleotide polymorphic loci, in addition to, the encoded polypeptide polymorphic loci of the present invention for this particular protein, which include but are not limited to the following polynucleotide polymorphisms: SLC21A6-G545A (SNP_ID: PS100s1), SLC21A6-C597A (SNP_ID: PS100s2), SLC21A6-T522C (SNP_ID: PS100s9), SLC21A6-C1597G (SNP_ID: PS100s23), SLC21A6- G1382A (SNP_ID: PS100s25), SLC21A6- C1334G (SNP_ID: PS100s26), SLC21A6- T655C (SNP_ID: PS100s29), SLC21A6- T705C (SNP_ID: PS100s30) and/or SLC21A6- C731T (SNP_ID: PS100s31); and polypeptide polymorphisms—SLC21A6-P155T (SNP_ID: PS100s2), SLC21A6-D130Y (SNP_ID: PS100s9), SLC21A6-G488A (SNP_ID: PS100s23), SLC21A6-F400K (SNP_ID: PS100s26), and/or SLC21A6-V174A (SNP_ID: PS100s29). The standard one-letter abbreviation for amino acids is used to illustrate the deduced amino acid sequence. The polynucleotide sequence contains a sequence of 2830 nucleotides (SEQ ID NO:49), encoding a polypeptide of 691 amino acids (SEQ ID NO:50). The polynucleotide polymorphic sites are represented by an “N”, in bold. The polypeptide polymorphic sites are represented by an “X”, in bold. The present invention encompasses the polynucleotide at nucleotide position 545 as being either a “G” or an “A”, the polynucleotide at nucleotide position 597 as being either a “C” or an “A”, the polynucleotide at nucleotide position 522 as being either a “G” or a “T”, the polynucleotide at nucleotide position 1597 as being either a “G” or a “C”, the polynucleotide at nucleotide position 1382 as being either a “G” or an “A”, the polynucleotide at nucleotide position 1334 as being either a “C” or a “G”, the polynucleotide at nucleotide position 665 as being either a “T” or a “C”, the polynucleotide at nucleotide position 705 as being either a “T” or a “C”, and the polynucleotide at nucleotide position 731 as being either a “C” or a “T” of FIGS. 25A-C (SEQ ID NO:49), in addition to any combination thereof. The present invention also encompasses the polypeptide at amino acid position 155 as being either an “Pro” or an “Thr”, the polypeptide at amino acid position 130 as being either an “Asp” or a “Tyr”, the polypeptide at amino acid position 488 as being either an “Gly” or a “Ala”, the polypeptide at amino acid position 400 as being either an “Phe” or a “Lys”, and the polypeptide at amino acid position 174 as being either a “Val” or a “Ala” of FIGS. 25A-C (SEQ ID NO:50).

[0057] FIGS. 26A-F show the polynucleotide sequence (SEQ ID NO:289) and deduced amino acid sequence (SEQ ID NO:290) of the human organic anion transport cMOAT protein comprising, or alternatively consisting of, one or more of the predicted polynucleotide polymorphic loci, in addition to, the encoded polypeptide polymorphic loci of the present invention for this particular protein, which include but are not limited to the following polynucleotide polymorphisms: ABCC2- A3664T (SNP_ID: PS101s1), ABCC2- C4073T (SNP_ID: PS101s2), ABCC2- C4211T (SNP_ID: PS101s4), ABCC2- C4163T (SNP_ID: PS101s5), ABCC2- G4511A (SNP_ID: PS101s6), ABCC2- T4589C (SNP_ID: PS101s7), ABCC2- G3643T (SNP_ID: PS101s10), ABCC2- A2983G (SNP_ID: PS101s11), ABCC2- A359G (SNP_ID: PS101s13), ABCC2- T2110C (SNP_ID: PS101s22), ABCC2- G1350A (SNP_ID: PS101s23), ABCC2- C1320T (SNP_ID: PS101s24), and/or ABCC2- G3035A (SNP_ID: PS101s32); and polypeptide polymorphisms—ABCC2-E1188V (SNP_ID: PS101s1), ABCC2-R1181L (SNP_ID: PS101s10), ABCC2-K961R (SNP_ID: PS101s11), ABCC2-I670T (SNP_ID: PS101s22), ABCC2-V417I (SNP_ID: PS101s23), and/or ABCC2-L407K (SNP_ID: PS101s24). The standard one-letter abbreviation for amino acids is used to illustrate the deduced amino acid sequence. The polynucleotide sequence contains a sequence of 5300 nucleotides (SEQ ID NO:603), encoding a polypeptide of 1545 amino acids (SEQ ID NO:604). The polynucleotide polymorphic sites are represented by an “N”, in bold. The polypeptide polymorphic sites are represented by an “X”, in bold. The present invention encompasses the polynucleotide at nucleotide position 3664 as being either an “A” or a “T”, the polynucleotide at nucleotide position 4073 as being either a “C” or a “T”, the polynucleotide at nucleotide position 4211 as being either a “C” or a “T”, the polynucleotide at nucleotide position 4163 as being either a “C” or a “T”, the polynucleotide at nucleotide position 4511 as being either a “G” or an “A”, the polynucleotide at nucleotide position 4589 as being either a “T” or a “C”, the polynucleotide at nucleotide position 3643 as being either a “G” or a “T”, the polynucleotide at nucleotide position 2983 as being either an “A” or a “G”, the polynucleotide at nucleotide position 359 as being either an “A” or a “G”, the polynucleotide at nucleotide position 2110 as being either a “T” or a “C”, the polynucleotide at nucleotide position 1350 as being either a “G” or an “A”, the polynucleotide at nucleotide position 1320 as being either a “C” or a “T”, and the polynucleotide at nucleotide position 3035 as being either a “G” or an “A” of FIGS. 26A-F (SEQ ED NO:603), in addition to any combination thereof. The present invention also encompasses the polypeptide at amino acid position 1188 as being either an “Glu” or an “Val”, the polypeptide at amino acid position 1181 as being either an “Arg” or a “Leu”, the polypeptide at amino acid position 961 as being either an “Lys” or a “Arg”, the polypeptide at amino acid position 670 as being either an “Ile” or a “Thr”, the polypeptide at amino acid position 417 as being either an “Val” or a “Ile”, and the polypeptide at amino acid position 407 as being either a “Leu” or a “Lys” of FIGS. 26A-F (SEQ ID NO:604).

[0058] FIG. 27 illustrates an example of the possible haplotypes (A, B, C, and D) for an individual that has the following genotype at a particular genomic locus: A/G heterozygote at SNP1, G/C heterozygote at SNP2, and A/C heterozygote at SNP3.

[0059] FIG. 28 illustrates an example of how the haplotype of an individual at a particular genomic locus can be determined using a combination of the individuals genotype with the genotypes of the individuals parents genotypes at the same locus. The example is based upon one parent having an A/A genotype at SNP1, a G/C genotype at SNP2, and an A/A genotype at SNP3, and the other parent having an A/G genotype at SNP1, C/C genotype at SNP2, and C/C genotype at SNP3, and the child being heterozygote at all three SNPs. As shown, there is only one possible haplotype combination. The later is based upon the absence of a crossing over event at this locus during meiosis.

[0060] Table I provides a summary of the novel polypeptides and their encoding polynucleotides of the present invention.

[0061] Table II illustrates the preferred hybridization conditions for the polynucleotides of the present invention. Other hybridization conditions may be known in the art or described elsewhere herein.

[0062] Table III summarizes the single nucleotide polymorphisms (SNPs) of the present invention. ‘Gene Name’ refers to the gene in which the SNP resides; ° Coriell DNA Panel’ represents the number of DNA samples from the Coriell Institute, Collingswood, N.J. which were analyzed for each gene (see Table VII); ‘Total SNPs’ refers to the number of SNPs identified within each of the analyzed genes; ‘Misense’ and ‘Silent’ refer to the number of SNPs that either changed or did not change the amino acid sequence of the encoded polypeptide for each gene, respectfully; and ‘UTR’ and ‘Non-CDS’ refer to the number of SNPs which were found either within the “untranslated region” or “non-coding” region of the polynucleotide sequences of each gene, respectfully.

[0063] Table IV provides a detailed summary of the SNPs of the present invention (SEQ ID NO:51-119, and 120-188). ‘GENE_DESCRIPTION’ refers to the gene in which the SNP resides; ‘HGNC_ID’ refers to the gene symbol as designated by the HUGO Gene Nomenclature Committee; ‘SNP_ID’ refers to the unique name identifier associated with the SNP of the present invention; ‘CONTIG_NUM’ refers to the experimental sequence information of the contig in which the SNP was identified; ‘CONTIG_POS’ refers to the polynucleotide position within the experimental sequence contig at which the SNP resides; ‘FLANK_SEQ’ provides the genomic polynucleotide sequence of the gene immediately flanking the SNP—each sequence provides the reference (REF) and variable (ALT) nucleic acid residue at the polymorphic site according to the following format: 5′ Flanking polynucleotide sequence [REF/ALT] 3′ flanking polynucleotide sequence; ‘FLANK_SEQ REF (SEQ ID NO: )’ refers to the SEQ ID NO of the genomic polynucleotide sequence comprising the reference nucleic acid sequence within the Sequence Listing of the present invention; ‘FLANK_SEQ ALT (SEQ ID NO: )’ refers to the SEQ ID NO of the genomic polynucleotide sequence comprising the variable nucleic acid sequence within the Sequence Listing of the present invention; ‘REF_SEQ_ID’ refers to the Genbank Accession number of the reference genomic polynucleotide sequence in which the SNP resides, and which was used to design resequencing assays; ‘REF_SEQ_POS’ refers to the nucleotide position within the reference genomic polynucleotide sequence (REF_SEQ_ID) in which the polymorphism (SNP) resides; ‘REF_NT’ refers to the reference polymorphic nucleotide (SNP) allele within the reference genomic polynucleotide sequence; ‘ALT_NT’ refers to the variant polymorphic nucleotide (SNP) allele within the reference genomic polynucleotide sequence; ‘EXON’ refers to the location of the polymorphic nucleotide allele (SNP) within the gene structure of the referenced genomic polynucleotide sequence (putative exon/intron number) as determined using software programs well known in the art (e.g., BLAST2, Sim4, and/or GRAIL, etc.); ‘MUTATION_TYPE’ refers to the type of polymorphism according to the following classification: Missense—an SNP within the coding region of a gene resulting in a change in the encoded amino acid sequence, Silent—an SNP within the coding region of a gene but does not result in a change in the encoded amino acid sequence, and Non-CDS: an SNP that is located within the non-coding region (e.g., intron, untranslated region) of a gene; ‘REV_COMP’ refers to the relative 5′ to 3′ orientation of the reference genomic polynucleotide sequence compared to the cDNA polynucleotide sequence of the gene wherein ‘0’ indicates the genomic and cDNA sequences are in the same orientation, whereas ‘1’ indicates the genomic and cDNA sequences are in an opposing orientation; ‘REF_CODON’ refers to the reference nucleotide sequence of the codon in which the encoding SNPs reside; ‘ALT_CODON’ refers to the variable nucleotide sequence of the codon in which the encoding SNPs reside; ‘cDNA_SEQ_ID’ refers to the Genbank Accession Number for the cDNA gene sequence in which the SNP resides; and ‘cDNA_SEQ_POS’ refers to the nucleotide position of the SNP within the polynucleotide sequence of the cDNA.

[0064] Table V provides a detailed summary of the SNPs of the present invention comprising additional 5′ and 3′ flanking genomic sequence (SEQ ID NO:189-257, and 258-326). The Table headings are the same as in Table IV with the following exceptions: ‘REFSEQ_FLANK’ provides the genomic polynucleotide sequence of the gene flanking the SNP—each sequence provides the reference (REF) and variable (ALT) nucleic acid residue at the polymorphic site according to the following format: 5′ Flanking polynucleotide sequence [REF/ALT] 3′ flanking polynucleotide sequence; ‘REFSEQ_FLANK_ORIENT’ refers to the relative orientation (sense or antisense, 5′ to 3′ or 3′ to 5′) of the REFSEQ_FLANK polynucletide sequence with respect to the FLANK_SEQ polynucletide orientation wherein a “0” refers to the FLANK_SEQ and REFSEQ_FLANK polynucleotide sequences having the same orientation, as opposed to a “1” wherein the FLANK_SEQ and REFSEQ_FLANK polynucleotide sequences have an opposing orientation; ‘REFSEQ_FLANK REF (SEQ ID NO: )’ refers to the SEQ ID NO of the genomic polynucleotide sequence comprising the reference nucleic acid sequence within the Sequence Listing of the present invention; and ‘REFSEQ_FLANK ALT (SEQ ID NO: )’ refers to the SEQ ID NO of the genomic polynucleotide sequence comprising the variable nucleic acid sequence within the Sequence Listing of the present invention.

[0065] Table VI provides a detailed summary of the SNPs of the present invention which fall within the coding region of the captioned genes. The Table headings are the same as in Table IV and V with the following exceptions: ‘REF_AA’ refers to the reference amino acid within the reference protein sequence within which an encoding SNP of the present invention resides; ‘ALT_AA’ refers to the variant amino acid within the reference protein sequence affected by an encoding SNP of the present invention; ‘PROTEIN_ID’ refers to the Genbank Accession Number of the reference protein sequence; ‘PROTEIN_POS’ refers to the amino acid location affected by the encoding SNP within the reference protein sequence.

[0066] Table VII provides the ethnicity and sample ID for each of the Coriell DNA samples (Coriell Institute, Collingswood, N.J.) used in identifying the SNPs of the present invention. The table also identifies the plate number of the relevant samples used in the assays, as described elsewhere herein.

[0067] Table VIII provides a detailed summary of the various PCR primers that were used in amplifying relevant regions of the organic anion transport genes for single nucleotide polymorphism analysis. The Table headings are the same as in Table IV and V above with the following exceptions: ‘PCR Amplicon_Name’ refers to the name given to product of the PCR amplified DNA; ‘Target_Name’ refers to the name of the region of genomic DNA for each gene which was targeted for PCR amplification; ‘PCR Left primer’ refers to the 5′ primer used to amplify the target; ‘PCR Left primer (SEQ ID NO:)’ refers to the SEQ ID NO for this particular sequence within the Sequence Listing of the present invention; ‘PCR Right primer’ refers to the 3′ primer used to amplify the target; and ‘PCR Right primer (SEQ ID NO:)’ refers to the SEQ ID NO for this particular sequence within the Sequence Listing of the present invention.

[0068] Table IX provides a detailed summary of the various sequencing primers that were used in sequencing relevant regions of the organic anion transport genes (e.g., PCR Amplicons of Table VIII) for single nucleotide polymorphism analysis. The Table headings are the same as in Table IV, V, and VIII above with the following exceptions: ‘Forward Sequencing Primer’ refers to the 3′ (forward) primer used for sequencing across the PCR amplicon; ‘Forward_Seq_Name’ refers to the name given to the resulting forward sequence for a particular PCR amplicon; ‘Forward Sequencing Primer (SEQ ID NO:)’ refers to the SEQ ID NO for this particular sequence within the Sequence Listing of the present invention; ‘Reverse Sequencing Primer’ refers to the 5′ (reverse) primer used for sequencing across the PCR amplicon; ‘Reverse_Seq_Name’ refers to the name given to the resulting reverse sequence for a particular PCR amplicon; and ‘Reverse Sequencing Primer (SEQ ID NO:)’ refers to the SEQ ID NO for this particular sequence within the Sequence Listing of the present invention.

[0069] Table X provides a detailed summary of the various primers that were used in genotyping the single nucleotide polymorphisms of the organic anion transport gene SNPs of the present invention. The Table headings are the same as in Table IV, V, and VIII above with the following exceptions: ‘ORCHID_LEFT’ refers to the 3′ (forward) primer used for sequencing across the SNP loci of each respective SNP; ‘ORCHID_LEFT’ (SEQ ID NO:)’ refers to the SEQ ID NO for this particular sequence within the Sequence Listing of the present invention; ‘ORCHID_RIGHT’ refers to the 5′ (reverse) primer used for sequencing across the SNP loci of each respective SNP; ‘ORCHID_RIGHT’ (SEQ ID NO:)’ refers to the SEQ ID NO for this particular sequence within the Sequence Listing of the present invention; ‘ORCHID_SNPIT’ refers to the hybridization oligonucleotide used for single base extension; ‘ORCHID_SNPIT (SEQ ID NO:)’ refers to the SEQ ID NO for this particular sequence within the Sequence Listing of the present invention.

[0070] Table XI provides a detailed summary of the various primers that may be used in genotyping the single nucleotide polymorphisms of the organic anion transport gene SNPs of the present invention using the alternative GBS method described herein. The Table headings are the same as in Table IV, V, and VIII above with the following exceptions: ‘GBS_LEFT’ refers to the 3′ (forward) primer that may be used for sequencing across the SNP loci of each respective SNP; ‘GBS_LEFT (SEQ ID NO:)’ refers to the SEQ ID NO for this particular sequence within the Sequence Listing of the present invention; ‘GBS_RIGHT’ refers to the 5′ (reverse) primer that may be used for sequencing across the SNP loci of each respective SNP; and ‘GBS_RIGHT (SEQ ID NO:)’ refers to the SEQ ID NO for this particular sequence within the Sequence Listing of the present invention.

### DETAILED DESCRIPTION OF THE INVENTION

[0071] The present invention relates to a nucleic acid molecule which comprises a single nucleotide polymorphism (SNP) at a specific location. The nucleic acid molecule, e.g., a gene, which includes the SNP has at least two alleles, referred to herein as the reference allele and the variant allele. The reference allele (prototypical or wild type allele) has been designated arbitrarily and typically corresponds to the nucleotide sequence of the native form of the nucleic acid molecule. The variant allele differs from the reference allele by one nucleotide at the site(s) identified in the Table IV, V, and/or VI. The present invention also relates to variant alleles of the described genes and to complements of the variant alleles. The invention further relates to portions of the variant alleles and portions of complements of the variant alleles which comprise (encompass) the site of the SNP and are at least nucleotides in length. Portions can be, for example, 5-10,5-15, 10-20,5-25, 10-30, 10- or 10-100 bases long. F or example, a portion of a variant allele which is nucleotides in length includes the single nucleotide polymorphism (the nucleotide which differs from the reference allele at that site) and twenty additional nucleotides which flank the site in the variant allele. These additional nucleotides can be on one or both sides of the polymorphism. Polymorphisms which are the subject of this invention are defined in Table IV, V, or VI herein.

[0072] For example, the invention relates to a portion of a gene (e.g., OATP2, solute carrier family 21 member 6 (SLC21A6)) having a nucleotide sequence according to FIGS. 3A-C (SEQ ID NO:5) comprising a single nucleotide polymorphism at a specific position (e.g., nucleotide 545). The reference nucleotide for this polymorphic form of OATP2 is shown in the ‘FLANK_SEQ (REF/ALT)’ column as the “REF” nucleotide (in this case, the “REF” nucletide is “G”) of Table IV, and the variant nucleotide is shown in the ‘FLANK_SEQ (REF/ALT)’ column as the “ALT” nucleotide of Table IV (in this case, the “ALT” nucleotide is an “A”). In a preferred embodiment, the nucleic acid molecule of the invention comprises the variant (alternate) nucleotide at the polymorphic position. For example, the invention relates to a nucleic acid molecule which comprises the nucleic acid sequence shown in the ‘FLANK_SEQ (REF/ALT)’ as the “ALT” nucleotide in Table IV having an “A” at nucleotide position 545 of FIGS. 3A-C (SEQ ID NO:5). The nucleotide sequences of the invention can be double- or single-stranded.

[0073] The invention further relates to other portions of a gene as described herein containing a polymorphic locus, preferably comprising the polymorphic allele (i.e., the ‘ALT’ allele, or variant allele).

[0074] The invention further provides allele-specific oligonucleotides that hybridize to a gene comprising a single nucleotide polymorphism or to the complement of the gene. Such oligonucleotides will hybridize to one polymorphic form of the nucleic acid molecules described herein but not to the other polymorphic form(s) of the sequence. Thus, such oligonucleotides can be used to determine the presence or absence of particular alleles of the polymorphic sequences described herein. These oligonucleotides can be probes or primers.

[0075] The invention further provides a method of analyzing a nucleic acid from an individual. The method determines which base is present at any one of the polymorphic sites shown in Tables I, IV, V, or VI. Optionally, a set of bases occupying a set of the polymorphic sites shown in Tables I, IV, V, or VI is determined. This type of analysis can be performed on a number of individuals, who are also tested (previously, concurrently or subsequently) for the presence of a disease phenotype. The presence or absence of disease phenotype is then correlated with a base or set of bases present at the polymorphic site or sites in the individuals tested.

[0076] Thus, the invention further relates to a method of predicting the presence, absence, likelihood of the presence or absence, or severity of a particular phenotype or disorder associated with a particular genotype. The method comprises obtaining a nucleic acid sample from an individual and determining the identity of one or more bases (nucleotides) at polymorphic sites of nucleic acid molecules described herein, wherein the presence of a particular base is correlated with a specified phenotype or disorder, thereby predicting the presence, absence, likelihood of the presence or absence, or severity of the phenotype or disorder in the individual. The correlation between a particular polymorphic form of agene and a phenotype can thus be used in methods of diagnosis of that phenotype, as well as in the development of treatments for the phenotype.

[0077] The invention further relates to a polynucleotide encoding a polypeptide fragment of SEQ ID NO:6, 8, 10, 12, 14, 16, 18, 20, 22, 24, 26, 28, 30, 32, 34, 36, 38, 40, 42, 44, 46, 48, 50, and/or 604, or a polypeptide fragment encoded by the cDNA sequence included in the deposited clone, which is hybridizable to SEQ ID NO:5, 7, 9, 11, 13, 15, 17, 19, 21, 23, 25, 27, 29, 31, 33, 35, 37, 39, 41, 43, 45, 47, 49, and/or 603.

[0078] The invention further relates to a polynucleotide encoding a polypeptide domain of SEQ ID NO:6, 8, 10, 12, 14, 16, 18, 20, 22, 24, 26, 28, 30, 32, 34, 36, 38, 40, 42, 44, 46, 48, 50, and/or 604 or a polypeptide domain encoded by the cDNA sequence included in the deposited clone, which is hybridizable to SEQ ID NO:5, 7, 9, 11, 13, 15, 17, 19, 21, 23, 25, 27, 29, 31, 33, 35, 37, 39, 41, 43, 45, 47, 49, and/or 603.

[0079] The invention further relates to a polynucleotide encoding a polypeptide epitope of SEQ ID NO:6, 8, 10, 12, 14, 16, 18, 20, 22, 24, 26, 28, 30, 32, 34, 36, 38, 40, 42, 44, 46, 48, 50, and/or 604 or a polypeptide epitope encoded by the cDNA sequence included in the deposited clone, which is hybridizable to SEQ ID NO:5, 7, 9, 11, 13, 15, 17, 19, 21, 23, 25, 27, 29, 31, 33, 35, 37, 39, 41, 43, 45, 47, 49, and/or 603.

[0080] The invention further relates to a polynucleotide encoding a polypeptide of SEQ ID NO:6, 8, 10, 12, 14, 16, 18, 20, 22, 24, 26, 28, 30, 32, 34, 36, 38, 40, 42, 44, 46, 48, 50, and/or 604 or the cDNA sequence included in the deposited clone, which is hybridizable to SEQ ID NO:5, 7, 9, 11, 13, 15, 17, 19, 21, 23, 25, 27, 29, 31, 33, 35, 37, 39, 41, 43, 45, 47, 49, and/or 603, having biological activity.

[0081] The invention further relates to a polynucleotide which is a variant of SEQ ID NO:5, 7, 9, 11, 13, 15, 17, 19, 21, 23, 25, 27, 29, 31, 33, 35, 37, 39, 41, 43, 45, 47, 49, and/or 603.

[0082] The invention further relates to a polynucleotide which is an allelic variant of SEQ ID NO:5, 7, 9, 11, 13, 15, 17, 19, 21, 23, 25, 27, 29, 31, 33, 35, 37, 39, 41, 43, 45, 47, 49, and/or 603.

[0083] The invention further relates to a polynucleotide which encodes a species homologue of the SEQ ID NO:6, 8, 10, 12, 14, 16, 18, 20, 22, 24, 26, 28, 30, 32, 34, 36, 38, 40, 42, 44, 46, 48, 50, and/or 604.

[0084] The invention further relates to a polynucleotide which represents the complimentary sequence (antisense) of SEQ ID NO:5, 7, 9, 11, 13, 15, 17, 19, 21, 23, 25, 27, 29, 31, 33, 35, 37, 39, 41, 43, 45, 47, 49, and/or 603.

[0085] The invention further relates to a polynucleotide capable of hybridizing under stringent conditions to any one of the polynucleotides specified herein, wherein said polynucleotide does not hybridize under stringent conditions to a nucleic acid molecule having a nucleotide sequence of only A residues or of only T residues.

[0086] The invention further relates to an isolated nucleic acid molecule of SEQ ID NO:6, 8, 10, 12, 14, 16, 18, 20, 22, 24, 26, 28, 30, 32, 34, 36, 38, 40, 42, 44, 46, 48, 50, and/or 604, wherein the polynucleotide fragment comprises a nucleotide sequence encoding an organic anion transport protein.

[0087] The invention further relates to an isolated nucleic acid molecule of SEQ ID NO:5, 7, 9, 11, 13, 15, 17, 19, 21, 23, 25, 27, 29, 31, 33, 35, 37, 39, 41, 43, 45, 47, 49, and/or 603, wherein the polynucleotide fragment comprises a nucleotide sequence encoding the sequence identified as SEQ ID NO:6, 8, 10, 12, 14, 16, 18, 20, 22, 24, 26, 28, 30, 32, 34, 36, 38, 40, 42, 44, 46, 48, 50, and/or 604 or the polypeptide encoded by the cDNA sequence included in the deposited clone, which is hybridizable to SEQ ID NO:5, 7, 9, 11, 13, 15, 17, 19, 21, 23, 25, 27, 29, 31, 33, 35, 37, 39, 41, 43, 45, 47, 49, and/or 603.

[0088] The invention further relates to an isolated nucleic acid molecule of of SEQ ID NO:5, 7, 9, 11, 13, 15, 17, 19, 21, 23, 25, 27, 29, 31, 33, 35, 37, 39, 41, 43, 45, 47, 49, and/or 603, wherein the polynucleotide fragment comprises the entire nucleotide sequence of SEQ ID NO:5, 7, 9, 11, 13, 15, 17, 19, 21, 23, 25, 27, 29, 31, 33, 35, 37, 39, 41, 43, 45, 47, 49, and/or 603 or the cDNA sequence included in the deposited clone, which is hybridizable to SEQ ID NO:5, 7, 9, 11, 13, 15, 17, 19, 21, 23, 25, 27, 29, 31, 33, 35, 37, 39, 41, 43, 45, 47, 49, and/or 603.

[0089] The invention further relates to an isolated nucleic acid molecule of SEQ ID NO:5, 7, 9, 11, 13, 15, 17, 19, 21, 23, 25, 27, 29, 31, 33, 35, 37, 39, 41, 43, 45, 47, 49, and/or 603, wherein the nucleotide sequence comprises sequential nucleotide deletions from either the C-terminus or the N-terminus.

[0090] The invention further relates to an isolated polypeptide comprising an amino acid sequence that comprises a polypeptide fragment of SEQ ID NO:6, 8, 10, 12, 14, 16, 18, 20, 22, 24, 26, 28, 30, 32, 34, 36, 38, 40, 42, 44, 46, 48, 50, and/or 604 or the encoded sequence included in the deposited clone.

[0091] The invention further relates to a polypeptide fragment of SEQ ID NO:6, 8, 10, 12, 14, 16, 18, 20, 22, 24, 26, 28, 30, 32, 34, 36, 38, 40, 42, 44, 46, 48, 50, and/or 604 or the encoded sequence included in the deposited clone, having biological activity.

[0092] The invention further relates to a polypeptide domain of SEQ ID NO:6, 8, 10, 12, 14, 16, 18, 20, 22, 24, 26, 28, 30, 32, 34, 36, 38, 40, 42, 44, 46, 48, 50, and/or 604 or the encoded sequence included in the deposited clone.

[0093] The invention further relates to a polypeptide epitope of SEQ ID NO:6, 8, 10, 12, 14, 16, 18, 20, 22, 24, 26, 28, 30, 32, 34, 36, 38, 40, 42, 44, 46, 48, 50, and/or 604 or the encoded sequence included in the deposited clone.

[0094] The invention further relates to a full length protein of SEQ ID NO:6, 8, 10, 12, 14, 16, 18, 20, 22, 24, 26, 28, 30, 32, 34, 36, 38, 40, 42, 44, 46, 48, 50, and/or 604 or the encoded sequence included in the deposited clone.

[0095] The invention further relates to a variant of SEQ ID NO:6, 8, 10, 12, 14, 16, 18, 20, 22, 24, 26, 28, 30, 32, 34, 36, 38, 40, 42, 44, 46, 48, 50, and/or 604.

[0096] The invention further relates to an allelic variant of SEQ ID NO:6, 8, 10, 12, 14, 16, 18, 20, 22, 24, 26, 28, 30, 32, 34, 36, 38, 40, 42, 44, 46, 48, 50, and/or 604.

[0097] The invention further relates to a species homologue of SEQ ID NO:6, 8, 10, 12, 14, 16, 18, 20, 22, 24, 26, 28, 30, 32, 34, 36, 38, 40, 42, 44, 46, 48, 50, and/or 604.

[0098] The invention further relates to the isolated polypeptide of of SEQ ID NO:6, 8, 10, 12, 14, 16, 18, 20, 22, 24, 26, 28, 30, 32, 34, 36, 38, 40, 42, 44, 46, 48, 50, and/or 604, wherein the full length protein comprises sequential amino acid deletions from either the C-terminus or the N-terminus.

[0099] The invention further relates to an isolated antibody that binds specifically to the isolated polypeptide of SEQ ID NO:6, 8, 10, 12, 14, 16, 18, 20, 22, 24, 26, 28, 30, 32, 34, 36, 38, 40, 42, 44, 46, 48, 50, and/or 604.

[0100] The invention further relates to a method for preventing, treating, or ameliorating a medical condition, comprising administering to a mammalian subject a therapeutically effective amount of the polypeptide of SEQ ID NO:6, 8, 10, 12, 14, 16, 18, 20, 22, 24, 26, 28, 30, 32, 34, 36, 38, 40, 42, 44, 46, 48, 50, and/or 604 or the polynucleotide of SEQ ID NO:5, 7, 9,11, 13, 15, 17, 19, 21, 23, 25, 27, 29, 31, 33, 35, 37, 39, 41, 43, 45, 47, 49, and/or 603.

[0101] The invention further relates to a method of diagnosing a pathological condition or a susceptibility to a pathological condition in a subject comprising the steps of (a) determining the presence or absence of a mutation in the polynucleotide of SEQ ID NO:5, 7, 9, 11, 13, 15, 17, 19, 21, 23, 25, 27, 29, 31, 33, 35, 37, 39, 41, 43, 45, 47, 49, and/or 603; and (b) diagnosing a pathological condition or a susceptibility to a pathological condition based on the presence or absence of said mutation.

[0102] The invention further relates to a method of diagnosing a pathological condition or a susceptibility to a pathological condition in a subject comprising the steps of (a) determining the presence or amount of expression of the polypeptide of of SEQ ID NO:6, 8, 10, 12, 14, 16, 18, 20, 22, 24, 26, 28, 30, 32, 34, 36, 38, 40, 42, 44, 46, 48, 50, and/or 604 in a biological sample; and diagnosing a pathological condition or a susceptibility to a pathological condition based on the presence or amount of expression of the polypeptide.

[0103] The invention further relates to a method for identifying a binding partner to the polypeptide of SEQ ID NO:6, 8, 10, 12, 14, 16, 18, 20, 22, 24, 26, 28, 30, 32, 34, 36, 38, 40, 42, 44, 46, 48, 50, and/or 604 comprising the steps of (a) contacting the polypeptide of SEQ ID NO:6, 8, 10, 12, 14, 16, 18, 20, 22, 24, 26, 28, 30, 32, 34, 36, 38, 40, 42, 44, 46, 48, 50, and/or 604 with a binding partner; and (b) determining whether the binding partner effects an activity of the polypeptide.

[0104] The invention further relates to a gene corresponding to the cDNA sequence of SEQ ID NO:5, 7, 9, 11, 13, 15, 17, 19, 21, 23, 25, 27, 29, 31, 33, 35, 37, 39, 41, 43, 45, 47, 49, and/or 603.

[0105] The invention further relates to a method of identifying an activity in a biological assay, wherein the method comprises the steps of expressing SEQ ID NO:5, 7, 9, 11, 13, 15, 17, 19, 21, 23, 25, 27, 29, 31, 33, 35, 37, 39, 41, 43, 45, 47, 49, and/or 603 in a cell, (b) isolating the supernatant; (c) detecting an activity in a biological assay; and (d) identifying the protein in the supernatant having the activity.

[0106] The invention further relates to a process for making polynucleotide sequences encoding gene products having altered activity selected from the group consisting of SEQ ID NO:6, 8, 10, 12, 14, 16, 18, 20, 22, 24, 26, 28, 30, 32, 34, 36, 38, 40, 42, 44, 46, 48, 50, and/or 604 activity comprising the steps of (a) shuffling a nucleotide sequence of SEQ ID NO:5, 7, 9, 11, 13, 15, 17, 19, 21, 23, 25, 27, 29, 31, 33, 35, 37, 39, 41, 43, 45, 47, 49, and/or 603, (b) expressing the resulting shuffled nucleotide sequences and, (c) selecting for altered activity selected from the group consisting of SEQ ID NO:6, 8, 10, 12, 14, 16, 18, 20, 22, 24, 26, 28, 30, 32, 34, 36, 38, 40, 42, 44, 46, 48, 50, and/or 604 activity as compared to the activity selected from the group consisting of SEQ ID NO:6, 8, 10, 12, 14, 16, 18, 20, 22, 24, 26, 28, 30, 32, 34, 36, 38, 40, 42, 44, 46, 48, 50, and/or 604 activity of the gene product of said unmodified nucleotide sequence.

[0107] The invention further relates to a shuffled polynucleotide sequence produced by a shuffling process, wherein said shuffled DNA molecule encodes a gene product having enhanced tolerance to an inhibitor of any one of the activities selected from the group consisting of SEQ ID NO:6, 8, 10, 12, 14, 16, 18, 20, 22, 24, 26, 28, 30, 32, 34, 36, 38, 40, 42, 44, 46, 48, 50, and/or 604 activity.

[0108] The invention further relates to a method for preventing, treating, or ameliorating a medical condition with the polypeptide provided as SEQ ID NO:6, 8, 10, 12, 14, 16, 18, 20, 22, 24, 26, 28, 30, 32, 34, 36, 38, 40, 42, 44, 46, 48, 50, and/or 604, in addition to, its encoding nucleic acid, wherein the medical condition is a hepatic disorder

[0109] The invention further relates to a method for preventing, treating, or ameliorating a medical condition with the polypeptide provided as SEQ ID NO:6, 8, 10, 12, 14, 16, 18, 20, 22, 24, 26, 28, 30, 32, 34, 36, 38, 40, 42, 44, 46, 48, 50, and/or 604, in addition to, its encoding nucleic acid, wherein the medical condition is a metablic disorder.

[0110] The invention further relates to a method for preventing, treating, or ameliorating a medical condition with the polypeptide provided as SEQ ID NO:6, 8, 10, 12, 14, 16, 18, 20, 22, 24, 26, 28, 30, 32, 34, 36, 38, 40, 42, 44, 46, 48, 50, and/or 604, in addition to, its encoding nucleic acid, wherein the medical condition is a disorder that is treatable with pravastatin.

[0111] The invention further relates to a method for preventing, treating, or ameliorating a medical condition with the polypeptide provided as SEQ ID NO:6, 8, 10, 12, 14, 16, 18, 20, 22, 24, 26, 28, 30, 32, 34, 36, 38, 40, 42, 44, 46, 48, 50, and/or 604, in addition to, its encoding nucleic acid, wherein the medical condition is a disorder that is treatable with any of the known statins.

[0112] The invention further relates to a method for preventing, treating, or ameliorating a medical condition with the polypeptide provided as SEQ ID NO:6, 8, 10, 12, 14, 16, 18, 20, 22, 24, 26, 28, 30, 32, 34, 36, 38, 40, 42, 44, 46, 48, 50, and/or 604, in addition to, its encoding nucleic acid, wherein the medical condition is a hormonal disorder.

[0113] The invention relates to a nucleic acid molecule comprising a nucleic acid sequence selected from the group consisting of the nucleic acid sequences listed in Table I, Table IV, and Table V, wherein said nucleic acid sequence is at least 15 nucleotides in length and comprises a polymorphic site identified in Table I, IV, and V and wherein the nucleotide at the polymorphic site is different from a nucleotide at the polymorphic site in a corresponding reference allele.

[0114] The invention relates to a nucleic acid molecule with a nucleic acid sequence that is at least 20, 30, or 40 nucleotides in length.

[0115] The invention relates to a nucleic acid molecule wherein the nucleotide at the polymorphic site is the variant nucleotide for the nucleic acid sequence.

[0116] The invention relates to a nucleic acid molecule according wherein the nucleotide at the polymorphic site is the reference nucleotide for the nucleic acid sequence.

[0117] The invention further relates to an allele-specific oligonucleotide that hybridizes to a portion of a nucleic acid sequence selected from the group consisting of the nucleic acid sequences listed in Table I, Table IV, and Table V, wherein said portion is at least 15 nucleotides in length and comprises a polymorphic site identified in Table I, IV, or Table V, and wherein the nucleotide at the polymorphic site is different from a nucleotide at the polymorphic site in a corresponding reference allele.

[0118] The invention relates to an allele-specific oligonucleotide that is a probe and/or primer.

[0119] The invention relates to an allele-specific oligonucleotide wherein a central position of the probe aligns with the polymorphic site of the portion.

[0120] The invention further relates to an allele-specific oligonucleotide wherein the 3′ end of the primer aligns with the polymorphic site of the portion.

[0121] The invention relates to a method of analyzing a nucleic acid sample, comprising obtaining the nucleic acid sample from an individual; and determining a base occupying any one of the polymorphic sites shown in Table I, IV, V, or VI.

[0122] The invention relates to a method wherein the nucleic acid sample is obtained from a plurality of individuals, and a base occupying one of the polymorphic positions is determined in each of the individuals, and wherein the method further comprises testing each individual for the presence of a disease phenotype, and correlating the presence of the disease phenotype with the base.

[0123] The invention relates to a method of constructing haplotypes using the isolated nucleic acids provided herein comprising the step of grouping said nucleic acids. The invention also encompasses such a method further comprising the step of using said haplotypes to identify an individual for the presence of a disease phenotype, and correlating the presence of the disease phenotype with said haplotype. The invention relates to a nucleic acid molecule which represents the complementary sequence of the nucleic acid molecules provided herein. The invention relates to such a method further comprising the step of quantifying the nucleic acid sample comprising the polymorphic base.

### Definitions

[0124] An oligonucleotide can be DNA or RNA, and single- or double-stranded. Oligonucleotides can be naturally occurring or synthetic, but are typically prepared by synthetic means. Preferred oligonucleotides of the invention include segments of DNA, or their complements, which include any one of the polymorphic sites shown or described in Tables I, IV, V, or VI. The segments can be between 20 and 250 bases, and, in specific embodiments, are between 5-10, 5-20, 10-20, 10-50, 20-50 or 10-100 bases. For example, the segment can be about 20 bases. The polymorphic site can occur within any position of the segment. The segments can be from any of the allelic forms of DNA shown or described in Tables I, IV, V, or VI.

[0125] As used herein, the terms “nucleotide”, “base” and “nucleic acid” are intended to be equivalent. The terms “nucleotide sequence”, “nucleic acid sequence”, “nucleic acid molecule” and “segment” are intended to be equivalent.

[0126] Hybridization probes are oligonucleotides which bind in a base-specific manner to a complementary strand of nucleic acid. Such probes include peptide nucleic acids, as described in Nielsen et al., Science 254, 1497-1500 (1991). Probes can be any length suitable for specific hybridization to the target nucleic acid sequence. The most appropriate length of the probe may vary depending upon the hybridization method in which it is being used; for example, particular lengths may be more appropriate for use in microfabricated arrays, while other lengths may be more suitable for use in classical hybridization methods. Such optimizations are known to the skilled artisan. Suitable probes and primers can range from about nucleotidesto about nucleotides in length. For example, probes and primers can be 5, 6, 8, 10, 12, 14, 16, 18, 20, 22, 24, 25, 26, or 40 nucleotides in length. The probe or primer preferably overlaps at least one polymorphic site occupied by any of the possible variant nucleotides. The nucleotide sequence can correspond to the coding seqllence of the allele or to the complement of the coding sequence of the allele.

[0127] As used herein, the term “primer” refers to a single-stranded oligonucleotide which acts as a point of initiation of template-directed DNA synthesis under appropriate conditions (e.g., in the presence of four different nucleoside triphosphates and an agent for polymerization, such as DNA or RNA polymerase or reverse transcriptase) in an appropriate buffer and at a suitable temperature. The appropriate length of a primer depends on the intended use of the primer, but typically ranges from to nucleotides. Short primer molecules generally require cooler temperatures to form sufficiently stable hybrid complexes with the template. A primer need not reflect the exact sequence of the template, but must be sufficiently complementary to hybridize with a template. The term primer site refers to the area of the target DNA to which a primer hybridizes. The term primer pair refers to a set of primers including a 5′ (upstream) primer that hybridizes with the 5′ end of the DNA sequence to be amplified and a 3′ (downstream) primer that hybridizes with the complement of the 3′ end of the sequence to be amplified.

[0128] As used herein, linkage describes the tendency of genes, alleles, loci or genetic markers to be inherited together as a result of their location on the same chromosome. It can be measured by percent recombination between the two genes, alleles, loci or genetic markers.

[0129] As used herein, polymorphism refers to the occurance of two or more genetically determined alternative sequences or alleles in a population. A polymorphic marker or site is the locus at which divergence occurs. Preferred markers have at least two alleles, each occurring at frequency of greater than 1%, and more preferably greater than 10% or 20% of a selected population. A polymorphic locus may be as small as one base pair. Polymorphic markers include restriction fragment length polymorphisms, variable number of tandem repeats (VNTR's), hypervariable regions, minisatellites, dinucleotide repeats, trinucleotide repeats, tetranucleotide repeats, simple sequence repeats, and insertion elements such as Alu. The first identified allelic form is arbitrarily designated as the reference form and other allelic forms are designated as alternative or variant alleles. The allelic form occurring most frequently in a selected population is sometimes referred to as the wild type form. Diploid organisms may be homozygous or heterozygous for allelic forms. A diallelic or biallelic polymorphism has two forms. A triallelic polymorphism has three forms.

[0130] Work described herein pertains to the resequencing of large numbers of genes in a large number of individuals to identify polymorphisms which may predispose individuals to disease. For example, polymorphisms in genes which are expressed in liver may predispose individuals to disorders of the liver. Likewise, polymorphisms in genes which are expressed in cardiovascular tissue may predispose individuals to disorders of the heart and/or circulatory system.

[0131] By altering amino acid sequence, SNPs may alter the function of the encoded proteins. The discovery of the SNP facilitates biochemical analysis of the variants and the development of assays to characterize the variants and to screen for pharmaceutical that would interact directly with on or another form of the protein. SNPs (including silent SNPs) may also alter the regulation of the gene at the transcriptional or post-transcriptional level. SNPs (including silent SNPs) also enable the development of specific DNA, RNA, or protein-based diagnostics that detect the presence or absence of the polymorphism in particular conditions.

[0132] A single nucleotide polymorphism occurs at a polymorphic site occupied by a single nucleotide, which is the site of variation between allelic sequences. The site is usually preceded by and followed by highly conserved sequences of the allele (e.g., sequences that vary in less than 1/100 or 1/1000 members of the populations).

[0133] A single nucleotide polymorphism usually arises due to substitution of one nucleotide for another at the polymorphic site. A transition is the replacement of one purine by another purine or one pyrimidine by another pyrimidine. A transversion is the replacement of a purine by a pyrimidine or vice versa. Single nucleotide polymorphisms can also arise from a deletion of a nucleotide or an insertion of a nucleotide relative to a reference allele. Typically the polymorphic site is occupied by a base other than the reference base. For example, where the reference allele contains the base “T” at the polymorphic site, the altered allele can contain a “C”, “G” or “A” at the polymorphic site.

[0134] For the purposes of the present invention the terms “polymorphic position”, “polymorphic site”, “polymorphic locus”, and “polymorphic allele” shall be construed to be equivalent and are defined as the location of a sequence identified as having more than one nucleotide represented at that location in a population comprising at least one or more individuals, and/or chromosomes.

[0135] Hybridizations are usually performed under stringent conditions, for example, at a salt concentration of no more than 1 M and a temperature of at least 25° C. For example, conditions of 5×SSPE (750 mM NaCl, mM NaPhosphate, mM EDT A, pH 7.4) and a temperature of 25-30° C., or equivalent conditions, are suitable for allele-specific probe hybridizations. Equivalent conditions can be determined by varying one or more of the parameters given as an example, as known in the art, while maintaining a similar degree of identity or similarity between the target nucleotide sequence and the primer or probe used.

[0136] The term “isolated” is used herein to indicate that the material in question exists in a physical milieu distinct from that in which it occurs in nature, and thus is altered “by the hand of man” from its natural state. For example, an isolated nucleic acid of the invention may be substantially isolated with respect to the complex cellular milieu in which it naturally occurs. In some instances, the isolated material will form part of a composition (for example, a crude extract containing other substances), buffer system or reagent mix. In other circumstance, the material may be purified to essential homogeneity, for example as determined by PAGE or column chromatography such as HPLC. Preferably, an isolated nucleic acid comprises at least about 50, 80, or 90 percent (on a molar basis) of all macromolecular species present. For example, an isolated polynucleotide could be part of a vector or a composition of matter, or could be contained within a cell, and still be “isolated” because that vector, composition of matter, or particular cell is not the original environment of the polynucleotide. On one hand, the term “isolated” does not refer to genomic or cDNA libraries, whole cell total or mRNA preparations, genomic DNA preparations (including those separated by electrophoresis and transferred onto blots), sheared whole cell genomic DNA preparations or other compositions where the art demonstrates no distinguishing features of the polynucleotide/sequences of the present invention. On the other hand, in consideration of other embodiments of the present invention, specifically the single nucleotide polymorphisms of the present invention, the term “isolated” may refer to genomic or cDNA libraries, whole cell total or mRNA preparations, genomic DNA preparations (including those separated by electrophoresis and transferred onto blots), sheared whole cell genomic DNA preparations. However, the present invention is meant to encompass those compositions where the art demonstrates no distinguishing features of the polynucleotide/sequences of the present invention (e.g., the knowledge that a particular nucleotide position represents a polymorphic site, the knowledge of which allele represents the reference and/or variant nucleotide base, the association of a particular polymorphism with a disease or disorder, wherein such association was not appreciated heretofor, etc.).

[0137] On one hand, and in specific embodiments, the polynucleotides of the invention are at least 15, at least 30, at least 50, at least 100, at least 125, at least 500, or at least 1000 continuous nucleotides but are less than or equal to 300 kb, 200 kb, 100 kb, 50 kb, 15 kb, 10 kb, 7.5 kb, 5 kb, 2.5 kb, 2.0 kb, or 1 kb, in length. In a further embodiment, polynucleotides of the invention comprise a portion of the coding sequences, as disclosed herein, but do not comprise all or a portion of any intron. In another embodiment, the polynucleotides comprising coding sequences do not contain coding sequences of a genomic flanking gene (i.e., 5′ or 3′ to the gene of interest in the genome). In other embodiments, the polynucleotides of the invention do not contain the coding sequence of more than 1000, 500, 250, 100, 50, 25, 20, 15, 10, 5, 4, 3, 2, or 1 genomic flanking gene(s).

[0138] On the other hand, and in specific embodiments, the polynucleotides of the invention are at least 15, at least 30, at least 50, at least 100, at least 125, at least 500, or at least 1000 continuous nucleotides but are less than or equal to 300 kb, 200 kb, 100 kb, 50 kb, 15 kb, 10 kb, 7.5 kb, 5 kb, 2.5 kb, 2.0 kb, or 1 kb, in length. In a further embodiment, polynucleotides of the invention comprise a portion of the coding sequences, comprise a portion of non-coding sequences, comprise a portion of an intron sequence, etc., as disclosed herein. In another embodiment, the polynucleotides comprising coding sequences may correspond to a genomic sequence flanking a gene (i.e., 5′ or 3′ to the gene of interest in the genome). In other embodiments, the polynucleotides of the invention may contain the non-coding sequence of more than 1000, 500, 250, 100, 50, 25, 20, 15, 10, 5, 4, 3, 2, or 1 genomic flanking gene(s).

[0139] As used herein, a “polynucleotide” refers to a molecule having a nucleic acid sequence contained in SEQ ID NO:5, 7, 9, 11, 13, 15, 17, 19, 21, 23, 25, 27, 29, 31, 33, 35, 37, 39, 41, 43, 45, 47, 49, and/or 603. For example, the polynucleotide can contain the nucleotide sequence of the full length cDNA sequence, including the 5′ and 3′ untranslated sequences, the coding region, with or without a signal sequence, the secreted protein coding region, as well as fragments, epitopes, domains, and variants of the nucleic acid sequence. Moreover, as used herein, a “polypeptide” refers to a molecule having the translated amino acid sequence generated from the polynucleotide as broadly defined.

[0140] Unless otherwise indicated, all nucleotide sequences determined by sequencing a DNA molecule herein were determined using an automated DNA sequencer (such as the Model 373, preferably a Model 3700, from Applied Biosystems, Inc.), and all amino acid sequences of polypeptides encoded by DNA molecules determined herein were predicted by translation of a DNA sequence determined above. Therefore, as is known in the art for any DNA sequence determined by this automated approach, any nucleotide sequence determined herein may contain some errors. Nucleotide sequences determined by automation are typically at least about 90% identical, more typically at least about 95% to at least about 99.9% identical to the actual nucleotide sequence of the sequenced DNA molecule. The actual sequence can be more precisely determined by other approaches including manual DNA sequencing methods well known in the art. As is also known in the art, a single insertion or deletion in a determined nucleotide sequence compared to the actual sequence will cause a frame shift in translation of the nucleotide sequence such that the predicted amino acid sequence encoded by a determined nucleotide sequence will be completely different from the amino acid sequence actually encoded by the sequenced DNA molecule, beginning at the point of such an insertion or deletion.

[0141] Using the information provided herein, such as the nucleotide sequence provided as SEQ ID NO:5, 7, 9, 11, 13, 15, 17, 19, 21, 23, 25, 27, 29, 31, 33, 35, 37, 39, 41, 43, 45, 47, 49, and/or 603, a nucleic acid molecule of the present invention encoding a polypeptide of the present invention may be obtained using standard cloning and screening procedures, such as those for cloning cDNAs using mRNA as starting material.

[0142] A “polynucleotide” of the present invention also includes those polynucleotides capable of hybridizing, under stringent hybridization conditions, to sequences contained in SEQ ID NO:5, 7, 9, 11, 13, 15, 17, 19, 21, 23, 25, 27, 29, 31, 33, 35, 37, 39, 41, 43, 45, 47, 49, and/or 603, or the complement thereof. “Stringent hybridization conditions” refers to an overnight incubation at 42 degree C in a solution comprising 50% formamide, 5×SSC (750 mM NaCl, 75 mM trisodium citrate), 50 mM sodium phosphate (pH 7.6), 5× Denhardt's solution, 10% dextran sulfate, and 20 μg/ml denatured, sheared salmon sperm DNA, followed by washing the filters in 0.1×SSC at about 65 degree C.

[0143] Also contemplated are nucleic acid molecules that hybridize to the polynucleotides of the present invention at lower stringency hybridization conditions. Changes in the stringency of hybridization and signal detection are primarily accomplished through the manipulation of formamide concentration (lower percentages of formamide result in lowered stringency); salt conditions, or temperature. For example, lower stringency conditions include an overnight incubation at 37 degree C. in a solution comprising 6×SSPE (20×SSPE=3M NaCl; 0.2M NaH2PO4; 0.02M EDTA, pH 7.4), 0.5% SDS, 30% formamide, 100 ug/ml salmon sperm blocking DNA; followed by washes at 50 degree C. with 1×SSPE, 0.1% SDS. In addition, to achieve even lower stringency, washes performed following stringent hybridization can be done at higher salt concentrations (e.g. 5×SSC).

[0144] Note that variations in the above conditions may be accomplished through the inclusion and/or substitution of alternate blocking reagents used to suppress background in hybridization experiments. Typical blocking reagents include Denhardt's reagent, BLOTTO, heparin, denatured salmon sperm DNA, and commercially available proprietary formulations. The inclusion of specific blocking reagents may require modification of the hybridization conditions described above, due to problems with compatibility.

[0145] Of course, a polynucleotide which hybridizes only to polyA+ sequences (such as any 3′ terminal polyA+ tract of a cDNA shown in the sequence listing), or to a complementary stretch of T (or U) residues, would not be included in the definition of “polynucleotide,” since such a polynucleotide would hybridize to any nucleic acid molecule containing a poly (A) stretch or the complement thereof (e.g., practically any double-stranded cDNA clone generated using oligo dT as a primer).

[0146] The polynucleotide of the present invention can be composed of any polyribonucleotide or polydeoxribonucleotide, which may be unmodified RNA or DNA or modified RNA or DNA. For example, polynucleotides can be composed of single- and double-stranded DNA, DNA that is a mixture of single- and double-stranded regions, single- and double-stranded RNA, and RNA that is mixture of single- and double-stranded regions, hybrid molecules comprising DNA and RNA that may be single-stranded or, more typically, double-stranded or a mixture of single- and double-stranded regions. In addition, the polynucleotide can be composed of triple-stranded regions comprising RNA or DNA or both RNA and DNA. A polynucleotide may also contain one or more modified bases or DNA or RNA backbones modified for stability or for other reasons. “Modified” bases include, for example, tritylated bases and unusual bases such as inosine. A variety of modifications can be made to DNA and RNA; thus, “polynucleotide” embraces chemically, enzymatically, or metabolically modified forms.

[0147] The polypeptide of the present invention can be composed of amino acids joined to each other by peptide bonds or modified peptide bonds, i.e., peptide isosteres, and may contain amino acids other than the 20 gene-encoded amino acids. The polypeptides may be modified by either natural processes, such as posttranslational processing, or by chemical modification techniques which are well known in the art. Such modifications are well described in basic texts and in more detailed monographs, as well as in a voluminous research literature. Modifications can occur anywhere in a polypeptide, including the peptide backbone, the amino acid side-chains and the amino or carboxyl termini. It will be appreciated that the same type of modification may be present in the same or varying degrees at several sites in a given polypeptide. Also, a given polypeptide may contain many types of modifications. Polypeptides may be branched, for example, as a result of ubiquitination, and they may be cyclic, with or without branching. Cyclic, branched, and branched cyclic polypeptides may result from posttranslation natural processes or may be made by synthetic methods. Modifications include acetylation, acylation, ADP-ribosylation, amidation, covalent attachment of flavin, covalent attachment of a heme moiety, covalent attachment of a nucleotide or nucleotide derivative, covalent attachment of a lipid or lipid derivative, covalent attachment of phosphotidylinositol, cross-linking, cyclization, disulfide bond formation, demethylation, formation of covalent cross-links, formation of cysteine, formation of pyroglutamate, formylation, gamma-carboxylation, glycosylation, GPI anchor formation, hydroxylation, iodination, methylation, myristoylation, oxidation, pegylation, proteolytic processing, phosphorylation, prenylation, racemization, selenoylation, sulfation, transfer-RNA mediated addition of amino acids to proteins such as arginylation, and ubiquitination. (See, for instance, Proteins—Structure and Molecular Properties, 2nd Ed., T. E. Creighton, W. H. Freeman and Company, New York (1993); Posttranslational Covalent Modification of Proteins, B. C. Johnson, Ed., Academic Press, New York, pgs. 1-12 (1983); Seifter et al., Meth Enzymol 182:626-646 (1990); Rattan et al., Ann NY Acad Sci 663:48-62 (1992).)

[0148] “SEQ ID NO:5, 7, 9, 11, 13, 15, 17, 19, 21, 23, 25, 27, 29, 31, 33, 35, 37, 39, 41, 43, 45, 47, 49, and/or 603” refers to a polynucleotide sequence while “SEQ ID NO:6, 8, 10, 12, 14, 16, 18, 20, 22, 24, 26, 28, 30, 32, 34, 36, 38, 40, 42, 44, 46, 48, 50, and/or 604” refers to a polypeptide sequence, both sequences identified by an integer specified in Table I, and/or in Table IV, V, or VI.

[0149] “A polypeptide having biological activity” refers to polypeptides exhibiting activity similar, but not necessarily identical to, an activity of a polypeptide of the present invention, including mature forms, as measured in a particular biological assay, with or without dose dependency. In the case where dose dependency does exist, it need not be identical to that of the polypeptide, but rather substantially similar to the dose-dependence in a given activity as compared to the polypeptide of the present invention (i.e., the candidate polypeptide will exhibit greater activity or not more than about 25-fold less and, preferably, not more than about tenfold less activity, and most preferably, not more than about three-fold less activity relative to the polypeptide of the present invention.)

[0150] The term “organism” as referred to herein is meant to encompass any organism referenced herein, though preferably to eukaryotic organisms, more preferably to manunals, and most preferably to humans.

[0151] The present invention encompasses the identification of proteins, nucleic acids, or other molecules, that bind to polypeptides and polynucleotides of the present invention (for example, in a receptor-ligand interaction). The polynucleotides of the present invention can also be used in interaction trap assays (such as, for example, that described by Ozenberger and Young (Mol Endocrinol., 9(10): 1321-9, (1995); and Ann. N. Y. Acad. Sci., 7;766:279-81, (1995)).

[0152] The polynucleotide and polypeptides of the present invention are useful as probes for the identification and isolation of full-length cDNAs and/or genomic DNA which correspond to the polynucleotides of the present invention, as probes to hybridize and discover novel, related DNA sequences, as probes for positional cloning of this or a related sequence, as probe to “subtract-out” known sequences in the process of discovering other novel polynucleotides, as probes to quantify gene expression, and as probes for microarrays.

[0153] In addition, polynucleotides and polypeptides of the present invention may comprise one, two, three, four, five, six, seven, eight, or more membrane domains.

[0154] Also, in preferred embodiments the present invention provides methods for further refining the biological function of the polynucleotides and/or polypeptides of the present invention.

[0155] Specifically, the invention provides methods for using the polynucleotides and polypeptides of the invention to identify orthologs, homologs, paralogs, variants, and/or allelic variants of the invention. Also provided are methods of using the polynucleotides and polypeptides of the invention to identify the entire coding region of the invention, non-coding regions of the invention, regulatory sequences of the invention, and secreted, mature, pro-, prepro-, forms of the invention (as applicable).

[0156] In preferred embodiments, the invention provides methods for identifying the glycosylation sites inherent in the polynucleotides and polypeptides of the invention, and the subsequent alteration, deletion, and/or addition of said sites for a number of desirable characteristics which include, but are not limited to, augmentation of protein folding, inhibition of protein aggregation, regulation of intracellular trafficking to organelles, increasing resistance to proteolysis, modulation of protein antigenicity, and mediation of intercellular adhesion.

[0157] In further preferred embodiments, methods are provided for evolving the polynucleotides and polypeptides of the present invention using molecular evolution techniques in an effort to create and identify novel variants with desired structural, functional, and/or physical characteristics.

[0158] As used herein the terms “modulate” or “modulates” refer to an increase or decrease in the amount, quality or effect of a particular activity, DNA, RNA, or protein. The definition of “modulate” or “modulates” as used herein is meant to encompass agonists and/or antagonists of a particular activity, DNA, RNA, or protein.

[0159] The present invention further provides for other experimental methods and procedures currently available to derive functional assignments. These procedures include but are not limited to spotting of clones on arrays, micro-array technology, PCR based methods (e.g., quantitative PCR), anti-sense methodology, gene knockout experiments, and other procedures that could use sequence information from clones to build a primer or a hybrid partner.

### Polynucleotides and Polypeptides of the Invention

### Features of the Polypeptide Encoded by Gene No:1

[0160] The present invention relates to isolated nucleic acid molecules comprising, or alternatively, consisting of all or a portion of the variant allele of the human OATP2, solute carrier family 21 member 6 gene (SNP_ID: PS100s1) (e.g., wherein reference or wildtype OATP2 gene is exemplified by SEQ ID NO:1). Preferred portions are at least 10, preferably at least 20, preferably at least 40, preferably at least 100, contiguous polynucleotides and comprise an “A” at the nucleotide position corresponding to nucleotide 545 of the OATP2 gene, or a portion of SEQ ID NO:5. Alternatively, preferred portions are at least 10, preferably at least 20, preferably at least 40, preferably at least 100, contiguous polynucleotides and comprise a “G” at the nucleotide position corresponding to nucleotide 545 of the OATP2 gene, or a portion of SEQ ID NO:5. The invention further relates to isolated gene products, e.g., polypeptides and/or proteins, which are encoded by a nucleic acid molecule comprising all or a portion of the variant allele of the OATP2 gene.

[0161] In one embodiment, the invention relates to a method for predicting the likelihood that an individual will have a disorder associated with an “A” at the nucleotide position corresponding to nucleotide position 545 of SEQ ID NO:5 (or diagnosing or aiding in the diagnosis of such a disorder) comprising the steps of obtaining a DNA sample from an individual to be assessed and determining the nucleotide present at position 545 of SEQ ID NO:5. The presence of an “A” at this position indicates that the individual has a greater likelihood of having a disorder associated therewith than an individual having a “G” at that position, or a greater likelihood of having more severe symptoms.

[0162] Conversely, the invention relates to a method for predicting the likelihood that an individual will have a disorder associated with a “G” at the nucleotide position corresponding to nucleotide position 545 of SEQ ID NO:5 (or diagnosing or aiding in the diagnosis of such a disorder) comprising the steps of obtaining a DNA sample from an individual to be assessed and determining the nucleotide present at position 545 of SEQ ID NO:5. The presence of a “G” at this position indicates that the individual has a greater likelihood of having a disorder associated therewith than an individual having an “A” at that position, or a greater likelihood of having more severe symptoms.

[0163] Representative disorders which may be detected, diagnosed, identified, treated, prevented, and/or ameliorated by the present invention include, the following, non-limiting diseases and disorders: decreased heptic uptake of administered statins, resistance to beneficial responses of administered statins; resistance to LDL lowering responses to administered statins; resistance to TG lowering responses to administered statins; resistance to HDL elevating responses to administered statins; increased incidence of drug interactions between one or more administered statins; increased incidence of drug and endogenous substance interactions between a statin drug and endogenous substrates of OATP2 including cholate, taurocholate, thyroid hormones T3 and T4, DHEAS, estradiol-17beta-glucuronide, estrone-3-sulfate, prostaglandin E2, thromboxane B2, leukotriene C4, leukotriene E4, and bilirubin and its conjugates; decreased response to HMG-CoA reductase inhibitors; in addition to other disorders referenced herein, which include, for example, any disorder related to high levels of circulating LDL, high levels of TG, and/or low levels of circularing HDL, which include, but are not limited to, cardiovascular diseases, hepatic diseases, angina pectoris, hypertension, heart failure, myocardial infarction, ventricular hypertrophy, vascular diseases, miscrovascular disease, vascular leak syndrome, aneurysm, stroke, embolism, thrombosis, endothelial dysfunction, coronary artery disease, arteriosclerosis, and/or atherosclerosis.

### Features of the Polypeptide Encoded by Gene No:2

[0164] The present invention relates to isolated nucleic acid molecules comprising, or alternatively, consisting of all or a portion of the variant allele of the human OATP2, solute carrier family 21 member 6 gene (SNP_ID: PS100s2) (e.g., wherein reference or wildtype OATP2 gene is exemplified by SEQ ID NO:1). Preferred portions are at least 10, preferably at least 20, preferably at least 40, preferably at least 100, contiguous polynucleotides and comprise an “A” at the nucleotide position corresponding to nucleotide 597 of the OATP2 gene, or a portion of SEQ ID NO:7. Alternatively, preferred portions are at least 10, preferably at least 20, preferably at least 40, preferably at least 100, contiguous polynucleotides and comprise a “C” at the nucleotide position corresponding to nucleotide 597 of the OATP2 gene, or a portion of SEQ ID NO:7. The invention further relates to isolated gene products, e.g., polypeptides and/or proteins, which are encoded by a nucleic acid molecule comprising all or a portion of the variant allele of the OATP2 gene.

[0165] In one embodiment, the invention relates to a method for predicting the likelihood that an individual will have a disorder associated with an “A” at the nucleotide position corresponding to nucleotide position 597 of SEQ ID NO:7 (or diagnosing or aiding in the diagnosis of such a disorder) comprising the steps of obtaining a DNA sample from an individual to be assessed and determining the nucleotide present at position 597 of SEQ ID NO:7. The presence of an “A” at this position indicates that the individual has a greater likelihood of having a disorder associated therewith than an individual having a “C” at that position, or a greater likelihood of having more severe symptoms.

[0166] Conversely, the invention relates to a method for predicting the likelihood that an individual will have a disorder associated with a “C” at the nucleotide position corresponding to nucleotide position 597 of SEQ ID NO:7 (or diagnosing or aiding in the diagnosis of such a disorder) comprising the steps of obtaining a DNA sample from an individual to be assessed and determining the nucleotide present at position 597 of SEQ ID NO:7. The presence of a “C” at this position indicates that the individual has a greater likelihood of having a disorder associated therewith than an individual having an “A” at that position, or a greater likelihood of having more severe symptoms.

[0167] The present invention further relates to isolated proteins or polypeptides comprising, or alternatively, consisting of all or a portion of the encoded variant amino acid sequence of the human human OATP2, solute carrier family 21 member 6 polypeptide (e.g., wherein reference or wildtype human OATP2, solute carrier family 21 member 6 polypeptide is exemplified by SEQ ID NO:2). Preferred portions are at least 10, preferably at least 20, preferably at least 40, preferably at least 100, contiguous polypeptides and comprises an “A” at the amino acid position corresponding to amino acid 155 of the OATP2 polypeptide, or a portion of SEQ ID NO:8. Alternatively, preferred portions are at least 10, preferably at least 20, preferably at least 40, preferably at least 100, contiguous polypeptides and comprises a “P” at the amino acid position corresponding to amino acid 155 of the OATP2 protein, or a portion of SEQ ID NO:8. The invention further relates to isolated nucleic acid molecules encoding such polypeptides or proteins, as well as to antibodies that bind to such proteins or polypeptides.

[0168] Representative disorders which may be detected, diagnosed, identified, treated, prevented, and/or ameliorated by the present invention include, the following, non-limiting diseases and disorders: decreased heptic uptake of administered statins, resistance to beneficial responses of administered statins; resistance to LDL lowering responses to administered statins; resistance to TG lowering responses to administered statins; resistance to HDL elevating responses to administered statins; increased incidence of drug interactions between one or more administered statins; increased incidence of drug and endogenous substance interactions between a statin drug and endogenous substrates of OATP2 including cholate, taurocholate, thyroid hormones T3 and T4, DHEAS, estradiol-17beta-glucuronide, estrone-3-sulfate, prostaglandin E2, thromboxane B2, leukotriene C4, leukotriene E4, and bilirubin and its conjugates; decreased response to HMG-CoA reductase inhibitors; in addition to other disorders referenced herein, which include, for example, any disorder related to high levels of circulating LDL, high levels of TG, and/or low levels of circularing HDL, which include, but are not limited to, cardiovascular diseases, hepatic diseases, angina pectoris, hypertension, heart failure, myocardial infarction, ventricular hypertrophy, vascular diseases, miscrovascular disease, vascular leak syndrome, aneurysm, stroke, embolism, thrombosis, endothelial dysfunction, coronary artery disease, arteriosclerosis, and/or atherosclerosis.

[0169] In preferred embodiments, the following N-terminal OATP2 (SNP_ID: PS100s2) deletion polypeptides are encompassed by the present invention: M1-C691, D2-C691, Q3-C691, N4-C691, Q5-C691, H6-C691, L7-C691, N8-C691, K9-C691, T10-C691, A11-C691, E12-C691, A13-C691, Q14-C691, P15-C691, S16-C691, E17-C691, N18-C691, K19-C691, K20-C691, T21-C691, R22-C691, Y23-C691, C24-C691, N25-C691, G26-C691, L27-C691, K28-C691, M29-C691, F30-C691, L31-C691, A32-C691, A33-C691, L34-C691, S35-C691, L36-C691, S37-C691, F38-C691, I39-C691, A40-C691, K41-C691, T42-C691, L43-C691, G44-C691, A45-C691, I46-C691, I47-C691, M48-C691, K49-C691, S50-C691, S51-C691, I52-C691, I53-C691, H54-C691, I55-C691, E56-C691, R57-C691, R58-C691, F59-C691, E60-C691, I61-C691, S62-C691, S63-C691, S64-C691, L65-C691, V66-C691, G67-C691, F68-C691, 169-C691, D70-C691, G71-C691, S72-C691, F73-C691, E74-C691, I75-C691, G76-C691, N77-C691, L78-C691, L79-C691, V80-C691, I81-C691, V82-C691, F83-C691, V84-C691, S85-C691, Y86-C691, F87-C691, G88-C691, S89-C691, K90-C691, L91-C691, H92-C691, R93-C691, P94-C691, K95-C691, L96-C691, I97-C691, G98-C691, I99-C691, G100-C691, C101-C691, F102-C691, I103-C691, M104-C691, G105-C691, I106-C691, G107-C691, G108-C691, V109-C691, L110-C691, T111-C691, A112-C691, L113-C691, P114-C691, H115-C691, F116-C691, F117-C691, M118-C691, G119-C691, Y120-C691, Y121-C691, R122-C601, Y123-C691, S124-C691, K125-C691, E126-C691, T127-C691, N128-C691, I129-C691, D130-C691, S131-C691, S132-C691, E133-C691, N134-C691, S135-C691, T136-C691, S137-C691, T138-C691, L139-C691, S140-C691, T141-C691, C142-C691, L143-C691, I144-C691, N145-C691, Q146-C691, I147-C691, L148-C691, S149-C691, L150-C691, N151-C691, R152-C691, A153-C691, S154-C691, T155-C691, E156-C691, I157-C691, V158-C691, G159-C691, K160-C691, G161-C691, C162-C691, L163-C691, K164-C691, E165-C691, S166-C691, G167-C691, S168-C691, Y169-C691, M170-C691, W171-C691, I172-C691, Y173-C691, V174-C691, F175-C691, M176-C691, G177-C691, N178-C691, M179-C691, L180-C691, R181-C691, G182-C691, I183-C691, G184-C691, E185-C691, T186-C691, P187-C691, I188-C691, V189-C691, P190-C691, L191-C691, G192-C691, L193-C691, S194-C691, Y195-C691, I196-C691, D197-C691, D198-C691, F199-C691, A200-C691, K201-C691, E202-C691, G203-C691, H204-C691, S205-C691, S206-C691, L207-C691, Y208-C691, L209-C691, G210-C691, I211-C691, L212-C691, N213-C691, A214-C691, I215-C691, A216-C691, M217-C691, I218-C691, G219-C691, P220-C691, I221-C691, I222-C691, G223-C691, F224-C691, T225-C691, L226-C691, G227-C691, S228-C691, L229-C691, F230-C691, S231-C691, K232-C691, M233-C691, Y234-C691, V235-C691, D236-C691, I237-C691, G238-C691, Y239-C691, V240-C691, D241-C691, L242-C691, S243-C691, T244-C691, I245-C691, R246-C691, I247-C691, T248-C691, P249-C691, T250-C691, D251 -C691, S252-C691, R253-C691, W254-C691, V255-C691, G256-C691, A257-C691, W258-C691, W259-C691, L260-C691, N261 -C691, F262-C691, L263-C691, V264-C691, S265-C691, G266-C691, L267-C691, F268-C691, S269-C691, 1270-C691, I271-C691, S272-C691, S273-C691, I274-C691, P275-C691, F276-C691, F277-C691, F278-C691, L279-C691, P280-C691, Q281-C691, T282-C691, P283-C691, N284-C691, K285-C691, P286-C691, Q287-C691, K288-C691, E289-C691, R290-C691, K291 -C691, A292-C691, S293-C691, L294-C691, S295-C691, L296-C691, H297-C691, V298-C691, L299-C691, E300-C691, T301-C691, N302-C691, D303-C691, E304-C691, K305-C691, D306-C691, Q307-C691, T308-C691, A309-C691, N310-C691, L311-C691, T312-C691, N313-C691, Q314-C691, G315-C691, K316-C691, N317-C691, I318-C691, T319-C691, K320-C691, N321-C691, V322-C691, T323-C691, G324-C691, F325-C691, F326-C691, Q327-C691, S328-C691, F329-C691, K330-C691, S331-C691, I332-C691, L333-C691, T334-C691, N335-C691, P336-C691, L337-C691, Y338-C691, V339-C691, M340-C691, F341-C691, V342-C691, L343-C691, L344-C691, T345-C691, L346-C691, L347-C691, Q348-C691, V349-C691, S350-C691. S351-C691, Y352-C691, I353-C691, G354-C691, A355-C691, F356-C691, T357-C691, Y358-C691, V359-C691, F360-C691, K361-C691, Y362-C691, V362-C691, E364-C691, Q365-C691, Q366-C691, Y367-C691, G368-C691, Q369-C691, P370-C691, S371-C691, S372-C691, K373-C691, A374-C691, N375-C691, I376-C691, L377-C691, L378-C691, G379-C691, V380-C691, I381-C691, T382-C691, I383-C691, P384-C691, I385-C691, F386-C691, A387-C691, S388-C691, G389-C691, M390-C691, F391-C691, L392-C691, G393-C691, G394-C691, Y395-C691, I396-C691, I397-C691, K398-C691, K399-C691, F400-C691, K401-C691, L402-C691, N403-C691, T404-C691, V405-C691, G406-C691, I407-C691, A408-C691, K409-C691, F410-C691, S411-C691, C412-C691, F413-C691, T414-C691, A414-C691, V416-C691, M417-C691, S418-C691, L419-C691, S420-C691, F421-C691, Y422-C691, L423-C691, L424-C691, Y425-C691, F426-C691, F427-C691, I428-C691, L429-C691, C430-C691, E431-C691, N432-C691, K433-C691, S434-C691, V435-C691, A436-C691, G437-C691, L438-C691, T439-C691, M440-C691, T441-C691, Y442-C691, D443-C691, G444-C691, N445-C691, N446-C691, P447-C691, V448-C691, T449-C691, S450-C691, H451-C691, R452-C691, D453-C691, V454-C691, P455-C691, L456-C691, S457-C691, Y458-C691, C459-C691, N460-C691, S461-C691, D462-C691, C463-C691, N464-C691, C465-C691, D466-C691, E467-C691, S468-C691, Q469-C691, W470-C691, E471-C691, P472-C691, V473-C691, C474-C691, G475-C691, N476-C691, N477-C691, G478-C691, 1479-C691, T480-C691, Y481-C691, I482-C691, S483-C691, P484-C691, C485-C691, L486-C691, A487-C691, G488-C691, C489-C691, K490-C691, S491-C691, S492-C691, S493-C691, G494-C691, N495-C691, K496-C691, K497-C691, P498-C691, I499-C691, V500-C691, F501-C691, Y502-C691, N503-C691, C504-C691, S505-C691, C506-C691, L507-C691, E508-C691, V509-C691, T510-C691, G511-C691, L512-C691, Q513-C691, N514-C691, R515-C691, N516-C691, Y517-C691, S518-C691, A519-C691, H520-C691, L521-C691, G522-C691, E523-C691, C524-C691, P525-C691, R526-C691, D527-C691, D528-C691, A529-C691, C530-C691, T531-C691, R532-C691, K533-C691, F534-C691, Y535-C691, F536-C691, F537-C691, V538-C691, A539-C691, I540-C691, Q541-C691, V542-C691, L543-C691, N544-C691, L545-C691, F546-C691, F547-C691, S548-C691, A549-C691, L550-C691, G551-C691, G552-C691, T553-C691, S554-C691, H555-C691, V556-C691, M557-C691, L558-C691, I559-C691, V560-C691, K561-C691, I562-C691, V563-C691, Q564-C691, P565-C691, E566-C691, L567-C691, K568-C691, S569-C691, L570-C691, A571-C691, L572-C691, G573-C691, F574-C691, H575-C691, S576-C691, M577-C691, V578-C691, I579-C691, R580-C691, A581-C691, L582-C691, G583-C691, G584-C691, I585-C691, L586-C691, A587-C691, P588-C691, I589-C691, Y590-C691, F591-C691, G592-C691, A593-C691, L594-C691, I595-C691, D596-C691, T597-C691, T598-C691, C599-C691, I600-C691, K601 -C691, W602-C691, S603-C691, T604-C691, N605-C691, N606-C691, C607-C691, G608-C691, T609-C691, R610-C691, G611-C691, S612-C691, C613-C691, R614-C691, T615-C691, Y616-C691, N617-C691, S618-C691, T619-C691, S620-C691, F621-C691, S622-C691, R623-C691, V624-C691, Y625-C691, L626-C691, G627-C691, L628-C691, S629-C691, S630-C691, M631-C691, L632-C691, R633-C691, V634-C691, S635-C691, S636-C691, L637-C691, V638-C691, L639-C691, Y640-C691, I641-C691, I642-C691, L643-C691, I644-C691, Y645-C691, A646-C691, M647-C691, K648-C691, K649-C691, K650-C691, Y651-C691, Q652-C691, E653-C691, K654-C691, D655-C691, I656-C691, N657-C691, A658-C691, S659-C691, E660-C691, N661-C691, G662-C691, S663-C691, V664-C691, M665-C691, D666-C691, E667-C691, A668-C691, N669-C691, L670-C691, E671 -C691, S672-C691, L673-C691, N674-C691, K675-C691, N676-C691, K677-C691, H678-C691, F679-C691, V680-C691, P681 -C691, S682-C691, A683-C691, G684-C691, and/or A685-C691 of SEQ ID NO:8. Polynucleotide sequences encoding these polypeptides are also provided. The present invention also encompasses the use of these N-terminal OATP2 (SNP_ID: PS100s2) deletion polypeptides as immunogenic and/or antigenic epitopes as described elsewhere herein.

[0170] In preferred embodiments, the following C-terminal OATP2 (SNP_ID: PS100s2) deletion polypeptides are encompassed by the present invention: M1-C691, M1-H690, M1-T689, M1-E688, M1-S687, M1-D686, M1-A685, M1-G684, M1-A683, M1-S682, M1-P681, M1-V680, M1-F679, M1-H678, M1-K677, M1-N676, M1-K675, M1-N674, M1-L673, M1-S672, M1-E671, M1-L670, M1-N669, M1-A668, M1-E667, M1-D666, M1-M665, M1-V664, M1-S663, M1-G662, M1-N661, M1-E660, M1-S659, M1-A658, M1-N657, M1-1656, M1-D655, M1-K654, M1-E653, M1-Q652, M1-Y651, M1-K650, M1-K649, M1-K648, M1-M647, M1-A646, M1-Y645, M1-1644, M1-L643, M1-1642, M1-1641, M1-Y640, M1-L639, M1-V638, M1-L637, M1-S636, M1-S635, M1-V634, M1-R633, M1-L632, M1-M631, M1-S630, M1-S629, M1-L628, M1-G627, M1-L626, M1-Y625, M1-V624, M1-R623, M1-S622, M1-F621, M1-S620, M1-T619, M1-S618, M1-N617, M1-Y616, M1-T615, M1-R614, M1-C613, M1-S612, M1-G611, M1-R610, M1-T609, M1-G608, M1-C607, M1-N606, M1-N605, M1-T604, M1-S603, M1-W602, M1-K601, M1-I600, M1-C599, M1-T598, M1-T597, M1-D596, M1-1595, M1-L594, M1-A593, M1-G592, M1-F591, M1-Y590, M1-1589, M1-P588, M1-A587, M1-L586, M1-I585, M1-G584, M1-G583, M1-L582, M1-A581, M1-R580, M1-I579, M1-V578, M1-M577, M1-S576, M1-H575, M1-F574, M1-G573, M1-L572, M1-A571, M1-L570, M1-S569, M1-K568, M1-L567, M1-E566, M1-P565, M1-Q564, M1-V563, M1-I562, M1-K561, M1-V560, M1-I559, M1-L558, M1-M557, M1-V556, M1-H555, M1-S554, M1-T553, M1-G552, M1-G551, M1-L550, M1-A549, M1-S548, M1-F547, M1-F546, M1-L545, M1-N544, M1-L543, M1-V542, M1-Q541, M1-I540, M1-A539, M1-V538, M1-F537, M1-F536, M1-Y535, M1-F534, M1-K533, M1-R532, M1-T531, M1-C530, M1-A529, M1-D528, M1-D527, M1-R526, M1-P525, M1-C524, M1-E523, M1-G522, M1-L521, M1-H520, M1-A519, M1-S518, M1-Y517, M1-N516, M1-R515, M1-N514, M1-Q513, M1-L512, M1-G511, M1-T510, M1-V509, M1-E508, M1-L507, M1-C506, M1-S505, M1-C504, M1-N503, M1-Y502, M1-F501, M1-V500, M1-I499, M1-P498, M1-K497, M1-K496, M1-N495, M1-G494, M1-S493, M1-S492, M1-S491, M1-K490, M1-C489, M1-G488, M1-A487, M1-L486, M1-C485, M1-P484, M1-S483, M1-I482, M1-Y481, M1-T480, M1-I479, M1-G478, M1-N477, M1-N476, M1-G475, M1-C474, M1-V473, M1-P472, M1-E471, M1-W470, M1-Q469, M1-S468, M1-E467, M1-D466, M1-C465, M1-N464, M1-C463, M1-D462, M1-S461, M1-N460, M1-C459, M1-Y458, M1-S457, M1-L456, M1-P455, M1-V454, M1-D453, M1-R452, M1-H451, M1-S450, M1-T449, M1-V448, M1-P447, M1-N446, M1-N445, M1-G444, M1-D443, M1-Y442, M1-T441, M1-M440, M1-T439, M1-L438, M1-G437, M1-A436, M1-V435, M1-S434, M1-K433, M1-N432, M1-E431, M1-C430, M1-L429, M1-I428, M1-F427, M1-F426, M1-Y425, M1-L424, M1-L423, M1-Y422, M1-F421, M1-S420, M1-L419, M1-S418, M1-M417, M1-V416, M1-A415, M1-T414, M1-F413, M1-C412, M1-S411, M1-F410, M1-K409, M1-A408, M1-I407, M1-G406, M1-V405, M1-T404, M1-N403, M1-L402, M1-K401, M1-F400, M1-K399, M1-K398, M1-I397, M1-I396, M1-Y395, M1-G394, M1-G393, M1-L392, M1-F391, M1-M390, M1-G389, M1-S388, M1-A387, M1-F386, M1-I385, M1-P384, M1-I383, M1-T382, M1-I381, M1-V380, M1-G379, M1-L378, M1-L377, M1-I376, M1-N375, M1-A374, M1-K373, M1-S372, M1-S371, M1-P370, M1-Q369, M1-G368, M1-Y367, M1-Q366, M1-Q365, M1-E364, M1-V363, M1-Y362, M1-K361, M1-F360, M1-V359, M1-Y358, M1-T357, M1-F356, M1-A355, M1-G354, M1-I353, M1-Y352, M1-S351, M1-S350, M1-V349, M1-Q348, M1-L347, M1-L346, M1-T345, M1-L344, M1-L343, M1-V342, M1-F341, M1-M340, M1-V339, M1-Y338, M1-L337, M1-P336, M1-N335, M1-T334, M1-L333, M1-I332, M1-S331, M1-K330, M1-F329, M1-S328, M1-Q327, M1-F326, M1-F325, M1-G324, M1-T323, M1-V322, M1-N321, M1-K320, M1-T319, M1-I318, M1-N317, M1-K316, M1-G315, M1-Q314, M1-N313, M1-T312, M1-L311, M1-N310, M1-A309, M1-T308, M1-Q307, M1-D306, M1-K305, M1-E304, M1-D303, M1-N302, M1-T301, M1-E300, M1-L299, M1-V298, M1-H297, M1-L296, M1-S295, M1-L294, M1-S293, M1-A292, M1-K291, M1-R290, M1-E289, M1-K288, M1-Q287, M1-P286, M1-K285, M1-N284, M1-P283, M1-T282, M1-Q281, M1-P280, M1-L279, M1-F278, M1-F277, M1-F276, M1-P275, M1-I274, M1-S273, M1-S272, M1-I271, M1-I270, M1-S269, M1-F268, M1-L267, M1-G266, M1-S265, M1-V264, M1-L263, M1-F262, M1-N261, M1-L260, M1-W259, M1-W258, M1-A257, M1-G256, M1-V255, M1-W254, M1-R253, M1-S252, M1-D251, M1-T250, M1-P249, M1-T248, M1-I247, M1-R246, M1-I245, M1-T244, M1-S243, M1-L242, M1-D241, M1-V240, M1-Y239, M1-G238, M1-I237, M1-D236, M1-V235, M1-Y234, M1-M233, M1-K232, M1-S231, M1-F230, M1-L229, M1-S228, M1-G227, M1-L226, M1-T225, M1-F224, M1-G223, M1-I222, M1-I221, M1-P220, M1-G219, M1-I218, M1-M217, M1-A216, M1-I215, M1-A214, M1-N213, M1-L212, M1-I211, M1-G210, M1-L209, M1-Y208, M1-L207, M1-S206, M1-S205, M1-H204, M1-G203, M1-E202, M1-K201, M1-A200, M1-F199, M1-D198, M1-D197, M1-I196, M1-Y195, M1-S194, M1-L193, M1-G192, M1-L191, M1-P190, M1-V189, M1-I188, M1-P187, M1-T186, M1-E185, M1-G184, M1-I183, M1-G182, M1-R181, M1-L180, M1-M179, M1-N178, M1-G177, M1-M176, M1-F175, M1-V174, M1-Y173, M1-I172, M1-W171, M1-M170, M1-Y169, M1-S168, M1-G167, M1-S166, M1-E165, M1-K164, M1-L163, M1-C162, M1-G161, M1-K160, M1-G159, M1-V158, M1-I157, M1-E156, M1-T155, M1-S154, M1-A153, M1-R152, M1-N151, M1-L150, M1-S149, M1-L148, M1-I147, M1-Q146, M1-N145, M1-I144, M1-L143, M1-C142, M1-T141, M1-S140, M1-L139, M1-T138, M1-S137, M1-T136, M1-S135, M1-N134, M1-E133, M1-S132, M1-S131, M1-D130, M1-I129, M1-N128, M1-T127, M1-E126, M1-K125, M1-S124, M1-Y123, M1-R122, M1-Y121, M1-Y120, M1-G119, M1-M118, M1-F117, M1-F116, M1-H115, M1-P114, M1-L113, M1-A112, M1-T111, M1-L110, M1-V109, M1-G108, M1-G107, M1-1106, M1-G105, M1-M104, M1-I103, M1-F102, M1-C101, M1-G100, M1-I99, M1-G98, M1-I97, M1-L96, M1-K95, M1-P94, M1-R93, M1-H92, M1-L91, M1-K90, M1-S89, M1-G88, M1-F87, M1-Y86, M1-S85, M1-V84, M1-F83, M1-V82, M1-I81, M1-V80, M1-L79, M1-L78, M1-N77, M1-G76, M1-175, M1-E74, M1-F73, M1-S72, M1-G71, M1-D70, M1-I69, M1-F68, M1-G67, M1-V66, M1-L65, M1-S64, M1-S63, M1-S62, M1-I61, M1-E60, M1-F59, M1-R58, M1-R57, M1-E56, M1-I55, M1-H54, M1-I53, M1-I52, M1-S51, M1-S50, M1-K49, M1-M48, M1-I47, M1-I46, M1-A45, M1-G44, M1-L43, M1-T42, M1-K41, M1-A40, M1-I39, M1-F38, M1-S37, M1-L36, M1-S35, M1-L34, M1-A33, M1-A32, M1-L31, M1-F30, M1-M29, M1-K28, M1-L27, M1-G26, M1-N25, M1-C24, M1-Y23, M1-R22, M1-T21, M1-K20, M1-K19, M1-N18, M1-E17, M1-S16, M1-P15, M1-Q14, M1-A13, M1-E12, M1-A11, M1-T10, M1-K9, M1-N8, and/or M1-L7 of SEQ ID NO:8. Polynucleotide sequences encoding these polypeptides are also provided. The present invention also encompasses the use of these C-terminal OATP2 (SNP_ID: PS100s2) deletion polypeptides as immunogenic and/or antigenic epitopes as described elsewhere herein.

[0171] Alternatively, preferred polypeptides of the present invention may comprise polypeptide sequences corresponding to, for example, internal regions of the OATP2 (SNP_ID: PS100s2) polypeptide (e.g., any combination of both N- and C-terminal OATP2 (SNP_ID: PS100s2) polypeptide deletions) of SEQ ID NO:8. For example, internal regions could be defined by the equation: amino acid NX to amino acid CX, wherein NX refers to any N-terminal deletion polypeptide amino acid of OATP2 (SNP_ID: PS100s2) (SEQ ID NO:8), and where CX refers to any C-terminal deletion polypeptide amino acid of OATP2 (SNP_ID: PS100s2) (SEQ ID NO:8). Polynucleotides encoding these polypeptides are also provided. The present invention also encompasses the use of these polypeptides as an immunogenic and/or antigenic epitope as described elsewhere herein. Preferably, the resulting deletion polypeptide comprises the polypeptide polymorphic loci identified elsewhere herein for OATP2 (SNP_ID: PS100s2), and more preferably comprises the polypeptide polymorphic allele identified elsewhere herein for OATP2 (SNP_ID: PS100s2).

### Features of the Polypeptide Encoded by Gene No:3

[0172] The present invention relates to isolated nucleic acid molecules comprising, or alternatively, consisting of all or a portion of the variant allele of the human OATP2, solute carrier family 21 member 6 gene (SNP_ID: PS100s9) (e.g., wherein reference or wildtype OATP2 gene is exemplified by SEQ ID NO:1). Preferred portions are at least 10, preferably at least 20, preferably at least 40, preferably at least 100, contiguous polynucleotides and comprise a “T at the nucleotide position corresponding to nucleotide 522 of the OATP2 gene, or a portion of SEQ ID NO:9. Alternatively, preferred portions are at least 10, preferably at least 20, preferably at least 40, preferably at least 100, contiguous polynucleotides and comprise a “G” at the nucleotide position corresponding to nucleotide 522 of the OATP2 gene, or a portion of SEQ ID NO:9. The invention further relates to isolated gene products, e.g., polypeptides and/or proteins, which are encoded by a nucleic acid molecule comprising all or a portion of the variant allele of the OATP2 gene.

[0173] In one embodiment, the invention relates to a method for predicting the likelihood that an individual will have a disorder associated with a “T” at the nucleotide position corresponding to nucleotide position 522 of SEQ ID NO:9 (or diagnosing or aiding in the diagnosis of such a disorder) comprising the steps of obtaining a DNA sample from an individual to be assessed and determining the nucleotide present at position 522 of SEQ ID NO:9. The presence of a “T” at this position indicates that the individual has a greater likelihood of having a disorder associated therewith than an individual having a “G” at that position, or a greater likelihood of having more severe symptoms.

[0174] Conversely, the invention relates to a method for predicting the likelihood that an individual will have a disorder associated with a “G” at the nucleotide position corresponding to nucleotide position 522 of SEQ ID NO:9 (or diagnosing or aiding in the diagnosis of such a disorder) comprising the steps of obtaining a DNA sample from an individual to be assessed and determining the nucleotide present at position 522 of SEQ ID NO:9. The presence of a “G” at this position indicates that the individual has a greater likelihood of having a disorder associated therewith than an individual having a “T” at that position, or a greater likelihood of having more severe symptoms.

[0175] The present invention further relates to isolated proteins or polypeptides comprising, or alternatively, consisting of all or a portion of the encoded variant amino acid sequence of the human human OATP2, solute carrier family 21 member 6 polypeptide (e.g., wherein reference or wildtype human OATP2, solute carrier family 21 member 6 polypeptide is exemplified by SEQ ID NO:2). Preferred portions are at least 10, preferably at least 20, preferably at least 40, preferably at least 100, contiguous polypeptides and comprises a “T” at the amino acid position corresponding to amino acid 130 of the OATP2 polypeptide, or a portion of SEQ ID NO:10. Alternatively, preferred portions are at least 10, preferably at least 20, preferably at least 40, preferably at least 100, contiguous polypeptides and comprises a “P” at the amino acid position corresponding to amino acid 130 of the OATP2 protein, or a portion of SEQ ID NO:10. The invention further relates to isolated nucleic acid molecules encoding such polypeptides or proteins, as well as to antibodies that bind to such proteins or polypeptides.

[0176] Representative disorders which may be detected, diagnosed, identified, treated, prevented, and/or ameliorated by the present invention include, the following, non-limiting diseases and disorders: decreased heptic uptake of administered statins, resistance to beneficial responses of administered statins; resistance to LDL lowering responses to administered statins; resistance to TG lowering responses to administered statins; resistance to HDL elevating responses to administered statins; increased incidence of drug interactions between one or more administered statins; increased incidence of drug and endogenous substance interactions between a statin drug and endogenous substrates of OATP2 including cholate, taurocholate, thyroid hormones T3 and T4, DHEAS, estradiol-17beta-glucuronide, estrone-3-sulfate, prostaglandin E2, thromboxane B2, leukotriene C4, leukotriene E4, and bilirubin and its conjugates; decreased response to HMG-CoA reductase inhibitors; in addition to other disorders referenced herein, which include, for example, any disorder related to high levels of circulating LDL, high levels of TG, and/or low levels of circularing HDL, which include, but are not limited to, cardiovascular diseases, hepatic diseases, angina pectoris, hypertension, heart failure, myocardial infarction, ventricular hypertrophy, vascular diseases, miscrovascular disease, vascular leak syndrome, aneurysm, stroke, embolism, thrombosis, endothelial dysfunction, coronary artery disease, arteriosclerosis, and/or atherosclerosis.

[0177] In preferred embodiments, the following N-terminal OATP2 (SNP_ID: PS100s9) deletion polypeptides are encompassed by the present invention: M1-C691, D2-C691, Q3-C691, N4-C691, Q5-C691, H6-C691, L7-C691, N8-C691, K9-C691, T10-C691, A11-C691, E12-C691, A13-C691, Q14-C691, P15-C691, S16-C691, E17-C691, N18-C691, K19-C691, K20-C691, T21-C691, R22-C691, Y23-C691, C24-C691, N25-C691, G26-C691, L27-C691, K28-C691, M29-C691, F30-C691, L31-C691, A32-C691, A33-C691, L34-C691, S35-C691, L36-C691, S37-C691, F38-C691, I39-C691, A40-C691, K41-C691, T42-C691, L43-C691, G44-C691, A45-C691, I46-C691, I47-C691, M48-C691, K49-C691, S50-C691, S51-C691, I52-C691, I53-C691, H54-C691, I55-C691, E56-C691, R57-C691, R58-C691, F59-C691, E60-C691, I61-C691, S62-C691, S63-C691, S64-C691, L65-C691, V66-C691, G67-C691, F68-C691, I69-C691, D70-C691, G71-C691, S72-C691, F73-C691, E74-C691, I75-C691, G76-C691, N77-C691, L78-C691, L79-C691, V80-C691, I81-C691, V82-C691, F83-C691, V84-C691, S85-C691, Y86-C691, F87-C691, G88-C691, S89-C691, K90-C691, L91-C691, H92-C691, R93-C691, P94-C691, K95-C691, L96-C691, I97-C691, G98-C691, I99-C691, G100-C691, C101-C691, F102-C691, I103-C691, M104-C691, G105-C691, I106-C691, G107-C691, G108-C691, V109-C691, L110-C691, T111-C691, A112-C691, L113-C691, P114-C691, H115-C691, F116-C691, F117-C691, M118-C691, G119-C691, Y120-C691, Y121-C691, R122-C691, Y123-C691, S124-C691, K125-C691, E126-C691, T127-C691, N128-C691, I129-C691, and/or Y130-C691 of SEQ ID NO:10. Polynucleotide sequences encoding these polypeptides are also provided. The present invention also encompasses the use of these N-terminal OATP2 (SNP_ID: PS100s9) deletion polypeptides as immunogenic and/or antigenic epitopes as described elsewhere herein.

[0178] In preferred embodiments, the following C-terminal OATP2 (SNP_ID: PS100s9) deletion polypeptides are encompassed by the present invention: M1-C691, M1-H690, M1-T689, M1-E688, M1-S687, M1-D686, M1-A685, M1-G684, M1-A683, M1-S682, M1-P681, M1-V680, M1-F679, M1-H678, M1-K677, M1-N676, M1-K675, M1-N674, M1-L673, M1-S672, M1-E671, M1-L670, M1-N669, M1-A668, M1-E667, M1-D666, M1-M665, M1-V664, M1-S663, M1-G662, M1-N661, M1-E660, M1-S659, M1-A658, M1-N657, M1-1656, M1-D655, M1-K654, M1-E653, M1-Q652, M1-Y651, M1-K650, M1-K649, M1-K648, M1-M647, M1-A646, M1-Y645, M1-I644, M1-L643, M1-I642, M1-I641, M1-Y640, M1-L639, M1-V638, M1-L637, M1-S636, M1-S635, M1-V634, M1-R633, M1-L632, M1-M631, M1-S630, M1-S629, M1-L628, M1-G627, M1-L626, M1-Y625, M1-V624, M1-R623, M1-S622, M1-F621, M1-S620, M1-T619, M1-S618, M1-N617, M1-Y616, M1-T615, M1-R614, M1-C613, M1-S612, M1-G611, M1-R610, M1-T609, M1-G608, M1-C607, M1-N606, M1-N605, M1-T604, M1-S603, M1-W602, M1-K601, M1-I600, M1-C599, M1-T598, M1-T597, M1-D596, M1-I595, M1-L594, M1-A593, M1-G592, M1-F591, M1-Y590, M1-I589, M1-P588, M1-A587, M1-L586, M1-I585, M1-G584, M1-G583, M1-L582, M1-A581, M1-R580, M1-I579, M1-V578, M1-M577, M1-S576, M1-H575, M1-F574, M1-G573, M1-L572, M1-A571, M1-L570, M1-S569, M1-K568, M1-L567, M1-E566, M1-P565, M1-Q564, M1-V563, M1-I562, M1-K561, M1-V560, M1-I559, M1-L558, M1-M557, M1-V556, M1-H555, M1-S554, M1-T553, M1-G552, M1-G551, M1-L550, M1-A549, M1-S548, M1-F547, M1-F546, M1-L545, M1-N544, M1-L543, M1-V542, M1-Q541, M1-I540, M1-A539, M1-V538, M1-F537, M1-F536, M1-Y535, M1-F534, M1-K533, M1-R532, M1-T531, M1-C530, M1-A529, M1-D528, M1-D527, M1-R526, M1-P525, M1-C524, M1-E523, M1-G522, M1-L521, M1-H520, M1-A519, M1-S518, M1-Y517, M1-N516, M1-R515, M1-N514, M1-Q513, M1-L512, M1-G511, M1-T510, M1-V509, M1-E508, M1-L507, M1-C506, M1-S505, M1-C504, M1-N503, M1-Y502, M1-F501, M1-V500, M1-I499, M1-P498, M1-K497, M1-K496, M1-N495, M1-G494, M1-S493, M1-S492, M1-S491, M1-K490, M1-C489, M1-G488, M1-A487, M1-L486, M1-C485, M1-P484, M1-S483, M1-I482, M1-Y481, M1-T480, M1-I479, M1-G478, M1-N477, M1-N476, M1-G475, M1-C474; M1-V473, M1-P472, M1-E471, M1-W470, M1-Q469, M1-S468, M1-E467, M1-D466, M1-C465, M1-N464, M1-C463, M1-D462, M1-S461, M1-N460, M1-C459, M1-Y458, M1-S457, M1-L456, M1-P455, M1-V454, M1-D453, M1-R452, M1-H451, M1-S450, M1-T449, M1-V448, M1-p447, M1-N446, M1-N445, M1-G444, M1-D443, M1-Y442, M1-T441, M1-M440, M1-T439, M1-L438, M1-G437, M1-A436, M1-V435, M1-S434, M1-K433, M1-N432, M1-E431, M1-C430, M1-L429, M1-I428, M1-F427, M1-F426, M1-Y425, M1-L424, M1-L423, M1-Y422, M1-F421, M1-S420, M1-L419, M1-S418, M1-M417, M1-V416, M1-A415, M1-T414, M1-F413, M1-C412, M1-S411, M1-F410, M1-K409, M1-A408, M1-I407, M1-G406, M1-V405, M1-T404, M1-N403, M1-L402, M1-K401, M1-F400, M1-K399, M1-K398, M1-I397, M1-I396, M1-Y395, M1-G394, M1-G393, M1-L392, M1-F391, M1-M390, M1-G389, M1-S388, M1-A387, M1-F386, M1-I385, M1-P384, M1-I383, M1-T382, M1-I381, M1-V380, M1-G379, M1-L378, M1-L377, M1-I376, M1-N375, M1-A374, M1-K373, M1-S372, M1-S371, M1-P370, M1-Q369, M1-G368, M1-Y367, M1-Q366, M1-Q365, M1-E364, M1-V363, M1-Y362, M1-K361, M1-F360, M1-V359, M1-Y358, M1-T357, M1-F356, M1-A355, M1-G354, M1-I353, M1-Y352, M1-S351, M1-S350, M1-V349, M1-Q348, M1-L347, M1-L346, M1-T345, M1-L344, M1-L343, M1-V342, M1-F341, M1-M340, M1-V339, M1-Y338, M1-L337, M1-P336, M1-N335, M1-T334, M1-L333, M1-I332, M1-S331, M1-K330, M1-F329, M1-S328, M1-Q327, M1-F326, M1-F325, M1-G324, M1-T323, M1-V322, M1-N321, M1-K320, M1-T319, M1-I318, M1-N317, M1-K316, M1-G315, M1-Q314, M1-N313, M1-T312, M1-L311, M1-N310, M1-A309, M1-T308, M1-Q307, M1-D306, M1-K305, M1-E304, M1-D303, M1-N302, M1-T301, M1-E300, M1-L299, M1-V298, M1-H297, M1-L296, M1-S295, M1-L294, M1-S293, M1-A292, M1-K291, M1-R290, M1-E289, M1-K288, M1-Q287, M1-P286, M1-K285, M1-N284, M1-P283, M1-T282, M1-Q281, M1-P280, M1-L279, M1-F278, M1-F277, M1-F276, M1-P275, M1-I274, M1-S273, M1-S272, M1-I271, M1-I270, M1-S269, M1-F268, M1-L267, M1-G266, M1-S265, M1-V264, M1-L263, M1-F262, M1-N261, M1-L260, M1-W259, M1-W258, M1-A257, M1-G256, M1-V255, M1-W254, M1-R253, M1-S252, M1-D251, M1-T250, M1-P249, M1-T248, M1-I247, M1-R246, M1-I245, M1-T244, M1-S243, M1-L242, M1-D241, M1-V240, M1-Y239, M1-G238, M1-I237, M1-D236, M1-V235, M1-Y234, M1-M233, M1-K232, M1-S231, M1-F230, M1-L229, M1-S228, M1-G227, M1-L226, M1-T225, M1-F224, M1-G223, M1-I222, M1-I221, M1-P220, M1-G219, M1-I218, M1-M217, M1-A216, M1-I215, M1-A214, M1-N213, M1-L212, M1-I211, M1-G210, M1-L209, M1-Y208, M1-L207, M1-S206, M1-S205, M1-H204, M1-G203, M1-E202, M1-K201, M1-A200, M1-F199, M1-D198, M1-D197, M1-I196, M1-Y195, M1-S194, M1-L193, M1-G192, M1-L191, M1-P190, M1-V189, M1-I188, M1-P187, M1-T186, M1-E185, M1-G184, M1-I183, M1-G182, M1-R181, M1-L180, M1-M179, M1-N178, M1-G177, M1-M176, M1-F175, M1-V174, M1-Y173, M1-I172, M1-W171, M1-M170, M1-Y169, M1-S168, M1-G167, M1-S166, M1-E165, M1-L164, M1-L163, M1-C162, M1-G161, M1-K160, M1-G159, M1-V158, M1-I157, M1-E156, M1-P155, M1-S154, M1-A153, M1-R152, M1-N151, M1-L150, M1-S149, M1-L148, M1-I147, M1-Q146, M1-N145, M1-I144, M1-L143, M1-C142, M1-T141, M1-S140, M1-L139, M1-T138, M1-S137, M1-T136, M1-S135, M1-N134, M1-E133, M1-S132, M1-S131, and/or M1-Y130 of SEQ ID NO:10. Polynucleotide sequences encoding these polypeptides are also provided. The present invention also encompasses the use of these C-terminal OATP2 (SNP_ID: PS100s9) deletion polypeptides as immunogenic and/or antigenic epitopes as described elsewhere herein.

[0179] Alternatively, preferred polypeptides of the present invention may comprise polypeptide sequences corresponding to, for example, internal regions of the OATP2 (SNP_ID: PS100s9) polypeptide (e.g., any combination of both N- and C-terminal OATP2 (SNP_ID: PS100s9) polypeptide deletions) of SEQ ID NO:10. For example, internal regions could be defined by the equation: amino acid NX to amino acid CX, wherein NX refers to any N-terminal deletion polypeptide amino acid of OATP2 (SNP_ID: PS100s9) (SEQ ID NO:10), and where CX refers to any C-terminal deletion polypeptide amino acid of OATP2 (SNP_ID: PS100s9) (SEQ ID NO:10). Polynucleotides encoding these polypeptides are also provided. The present invention also encompasses the use of these polypeptides as an immunogenic and/or antigenic epitope as described elsewhere herein. Preferably, the resulting deletion polypeptide comprises the polypeptide polymorphic loci identified elsewhere herein for OATP2 (SNP_ID: PS100s9), and more preferably comprises the polypeptide polymorphic allele identified elsewhere herein for OATP2 (SNP_ID: PS100s9).

### Features of the Polypeptide Encoded by Gene No:4

[0180] The present invention relates to isolated nucleic acid molecules comprising, or alternatively, consisting of all or a portion of the variant allele of the human OATP2, solute carrier family 21 member 6 gene (SNP_ID: PS100s23) (e.g., wherein reference or wildtype OATP2 gene is exemplified by SEQ ID NO:1). Preferred portions are at least 10, preferably at least 20, preferably at least 40, preferably at least 100, contiguous polynucleotides and comprise a “C” at the nucleotide position corresponding to nucleotide 1597 of the OATP2 gene, or a portion of SEQ ID NO:11. Alternatively, preferred portions are at least 10, preferably at least 20, preferably at least 40, preferably at least 100, contiguous polynucleotides and comprise a “G” at the nucleotide position corresponding to nucleotide 1597 of the OATP2 gene, or a portion of SEQ ID NO:11. The invention further relates to isolated gene products, e.g., polypeptides and/or proteins, which are encoded by a nucleic acid molecule comprising all or a portion of the variant allele of the OATP2 gene.

[0181] In one embodiment, the invention relates to a method for predicting the likelihood that an individual will have a disorder associated with a “C” at the nucleotide position corresponding to nucleotide position 1597 of SEQ ID NO:11 (or diagnosing or aiding in the diagnosis of such a disorder) comprising the steps of obtaining a DNA sample from an individual to be assessed and determining the nucleotide present at position 1597 of SEQ ID NO:11. The presence of a “C” at this position indicates that the individual has a greater likelihood of having a disorder associated therewith than an individual having a “G” at that position, or a greater likelihood of having more severe symptoms.

[0182] Conversely, the invention relates to a method for predicting the likelihood that an individual will have a disorder associated with a “G” at the nucleotide position corresponding to nucleotide position 1597 of SEQ ID NO:11 (or diagnosing or aiding in the diagnosis of such a disorder) comprising the steps of obtaining a DNA sample from an individual to be assessed and determining the nucleotide present at position 1597 of SEQ ID NO:11. The presence of a “G” at this position indicates that the individual has a greater likelihood of having a disorder associated therewith than an individual having a “C” at that position, or a greater likelihood of having more severe symptoms.

[0183] The present invention further relates to isolated proteins or polypeptides comprising, or alternatively, consisting of all or a portion of the encoded variant amino acid sequence of the human human OATP2, solute carrier family 21 member 6 polypeptide (e.g., wherein reference or wildtype human OATP2, solute carrier family 21 member 6 polypeptide is exemplified by SEQ ID NO:2). Preferred portions are at least 10, preferably at least 20, preferably at least 40, preferably at least 100, contiguous polypeptides and comprises an “A” at the amino acid position corresponding to amino acid 488 of the OATP2 polypeptide, or a portion of SEQ ID NO:12. Alternatively, preferred portions are at least 10, preferably at least 20, preferably at least 40, preferably at least 100, contiguous polypeptides and comprises a “G” at the amino acid position corresponding to amino acid 488 of the OATP2 protein, or a portion of SEQ ID NO:12. The invention further relates to isolated nucleic acid molecules encoding such polypeptides or proteins, as well as to antibodies that bind to such proteins or polypeptides.

[0184] Representative disorders which may be detected, diagnosed, identified, treated, prevented, and/or ameliorated by the present invention include, the following, non-limiting diseases and disorders: decreased heptic uptake of administered statins, resistance to beneficial responses of administered statins; resistance to LDL lowering responses to administered statins; resistance to TG lowering responses to administered statins; resistance to HDL elevating responses to administered statins; increased incidence of drug interactions between one or more administered statins; increased incidence of drug and endogenous substance interactions between a statin drug and endogenous substrates of OATP2 including cholate, taurocholate, thyroid hormones T3 and T4, DHEAS, estradiol-17beta-glucuronide, estrone-3-sulfate, prostaglandin E2, thromboxane B2, leukotriene C4, leukotriene E4, and bilirubin and its conjugates; decreased response to HMG-CoA reductase inhibitors; in addition to other disorders referenced herein, which include, for example, any disorder related to high levels of circulating LDL, high levels of TG, and/or low levels of circularing HDL, which include, but are not limited to, cardiovascular diseases, hepatic diseases, angina pectoris, hypertension, heart failure, myocardial infarction, ventricular hypertrophy, vascular diseases, miscrovascular disease, vascular leak syndrome, aneurysm, stroke, embolism, thrombosis, endothelial dysfunction, coronary artery disease, arteriosclerosis, and/or atherosclerosis.

[0185] In preferred embodiments, the following N-terminal OATP2 (SNP_ID: PS100s23) deletion polypeptides are encompassed by the present invention: M1-C691, D2-C691, Q3-C691, N4-C691, Q5-C691, H6-C691, L7-C691, N8-C691, K9-C691, T10-C691, A11-C691, E12-C691, A13-C691, Q14-C691, P15-C691, S16-C691, E17-C691, N18-C691, K19-C691, K20-C691, T21-C691, R22-C691, Y23-C691, C24-C691, N25-C691, G26-C691, L27-C691, K28-C691, M29-C691, F30-C691, L31-C691, A32-C691, A33-C691, L34-C691, S35-C691, L36-C691, S37-C691, F38-C691, I39-C691, A40-C691, K41-C691, T42-C691, L43-C691, G44-C691, A45-C691, I46-C691, I47-C691, M48-C691, K49-C691, S50-C691, S51-C691, I52-C691, I53-C691, H54-C691, I55-C691, E56-C691, R57-C691, R58-C691, F59C691, E60-C691, I61-C691, S62-C691, S63-C691, S64-C691, L65-C691, V66-C691, G67-C691, F68-C691, I69-C691, D70-C691, G71-C691, S72-C691, F73-C691, E74-C691, I75-C691, G76-C691, N77-C691, L78-C691, L79-C691, V80-C691, I81-C691, V82-C691, F83-C691, V84-C691, S85-C691, Y86-C691, F87-C691, G88-C691, S89-C691, K90-C691, L91-C691, H92-C691, R93-C691, P94-C691, K95-C691, L96-C691, I97-C691, G98-C691, I99-C691, G100-C691, C101-C691, F102-C691, I103-C691, M104-C691, G105-C691, I106-C691, G107-C691, G108-C691, V109-C691, L110-C691, T111-C691, A112-C691, L113-C691, P114-C691, H115-C691, F116-C691, F117-C691, M118-C691, G119-C691, Y120-C691, Y121-C691, R122-C691, Y123-C691, S124-C691, K125-C691, E126-C691, T127-C691, N128-C691, I129-C691, and/or Y488-C691 of SEQ ID NO:12. Polynucleotide sequences encoding these polypeptides are also provided. The present invention also encompasses the use of these N-terminal OATP2 (SNP_ID: PS100s23) deletion polypeptides as immunogenic and/or antigenic epitopes as described elsewhere herein.

[0186] In preferred embodiments, the following C-terminal OATP2 (SNP_ID: PS100s23) deletion polypeptides are encompassed by the present invention: M1-C691, M1-H690, M1-T689, M1-E688, M1-S687, M1-D686, M1-A685, M1-G684, M1-A683, M1-S682, M1-P681, M1-V680, M1-F679, M1-H678, M1-K677, M1-N676, M1-K675, M1-N674, M1-L673, M1-S672, M1-E671, M1-L670, M1-N669, M1-A668, M1-E667, M1-D666, M1-M665, M1-V664, M1-S663, M1-G662, M1-N661, M1-E660, M1-S659, M1-A658, M1-N657, M1-I656, M1-D655, M1-K654, M1-E653, M1-Q652, M1-Y651, M1-K650, M1-K649, M1-K648, M1-M647, M1-A646, M1-Y645, M1-I644, M1-L643, M1-I642, M1-I641, M1-Y640, M1-L639, M1-V638, M1-L637, M1-S636, M1-S635, M1-V634, M1-R633, M1-L632, M1-M631, M1-S630, M1-S629, M1-L628, M1-G627, M1-L626, M1-Y625, M1-V624, M1-R623, M1-S622, M1-F621, M1-S620, M1-T619, M1-S618, M1-N617, M1-Y616, M1-T615, M1-R614, M1-C613, M1-S612, M1-G611, M1-R610, M1-T609, M1-G608, M1-C607, M1-N606, M1-N605, M1-T604, M1-S603, M1-W602, M1-K601, M1-I600, M1-C599, M1-T598, M1-T597, M1-D596, M1-I595, M1-L594, M1-A593, M1-G592, M1-F591, M1-Y590, M1-I589, M1-P588, M1-A587, M1-L586, M1-I585, M1-G584, M1-G583, M1-L582, M1-A581, M1-R580, M1-I579, M1-V578, M1-M577, M1-S576, M1-H575, M1-F574, M1-G573, M1-L572, M1-A571, M1-L570, M1-S569, M1-K568, M1-L567, M1-E566, M1-P565, M1-Q564, M1-V563, M1-I562, M1-K561, M1-V560, M1-I559, M1-L558, M1-M557, M1-V556, M1-H555, M1-S554, M1-T553, M1-G552, M1-G551, M1-L550, M1-A549, M1-S548, M1-F547, M1-F546, M1-L545, M1-N544, M1-L543, M1-V542, M1-Q541, M1-I540, M1-A539, M1-V538, M1-F537, M1-F536, M1-Y535, M1-F534, M1-K533, M1-R532, M1-T531, M1-C530, M1-A529, M1-D528, M1-D527, M1-R526, M1-P525, M1-C524, M1-E523, M1-G1597, M1-L521, M1-H520, M1-A519, M1-S518, M1-Y517, M1-N516, M1-R515, M1-N514, M1-Q513, M1-L512, M1-G511, M1-T510, M1-V509, M1-E508, M1-L507, M1-C506, M1-S505, M1-C504, M1-N503, M1-Y502, M1-F501, M1-V500, M1-I499, M1-P498, M1-K497, M1-K496, M1-N495, M1-G494, M1-S493, M1-S492, M1-S491, M1-K490, M1-C489, M1-G488, M1-A487, M1-L486, M1-C485, M1-P484, M1-S483, M1-482, M1-Y481, M1-T480, M1-I479, M1-G478, M1-N477, M1-N476, M1-G475, M1-C474, M1-V473, M1-P472, M1-E471, M1-W470, M1-Q469, M1-S468, M1-E467, M1-D466, M1-C465, M1-N464, M1-C463, M1-D462, M1-S461, M1-N460, M1-C459, M1-Y458, M1-S457, M1-L456, M1-P455, M1-V454, M1-D453, M1-R452, M1-H451, M1-S450, M1-T449, M1-V448, M1-P447, M1-N446, M1-N445, M1-G444, M1-D443, M1-Y442, M1-T441, M1-M440, M1-T439, M1-L438, M1-G437, M1-A436, M1-V435, M1-S434, M1-K433, M1-N432, M1-E431, M1-C430, M1-L429, M1-I428, M1-F427, M1-F426, M1-Y425, M1-L424, M1-L423, M1-Y422, M1-F421, M1-S420, M1-L419, M1-S418, M1-M417, M1-V416, M1-A415, M1-T414, M1-F413, M1-C412, M1-S411, M1-F410, M1-K409, M1-A408, M1-I407, M1-G406, M1-V405, M1-T404, M1-N403, M1-L402, M1-K401, M1-F400, M1-K399, M1-K398, M1-I397, M1-I396, M1-Y396, M1-G394, M1-G393, M1-L392, M1-F391, M1-M390, M1-G389, M1-S388, M1-A387, M1-F386, M1-I385, M1-P384, M1-I383, M1-T382, M1-I381, M1-V380, M1-G379, M1-L378, M1-L377, M1-I376, M1-N375, M1-A374, M1-K373, M1-S372, M1-S371, M1-P370, M1-Q369, M1-G368, M1-Y367, M1-Q366, M1-Q365, M1-E364, M1-V363, M1-Y362, M1-K361, M1-F360, M1-V359, M1-Y358, M1-T357, M1-F356, M1-A355, M1-G354, M1-I353, M1-Y352, M1-S351, M1-S350, M1-V349, M1-Q348, M1-L347, M1-L346, M1-T345, M1-L344, M1-L343, M1-V342, M1-F341, M1-M340, M1-V339, M1-Y338, M1-L337, M1-P336, M1-N335, M1-T334, M1-L333, M1-I332, M1-S331, M1-K330, M1-F329, M1-S328, M1-Q327, M1-F326, M1-F325, M1-G324, M1-T323, M1-V322, M1-N321, M1-K320, M1-T319, M1-I318, M1-N317, M1-K316, M1-G315, M1-Q314, M1-N313, M1-T312, M1-L311, M1-N310, M1-A309, M1-T308, M1-Q307, M1-D306, M1-K305, M1-E304, M1-D303, M1-N302, M1-T301, M1-E300, M1-L299, M1-V298, M1-H297, M1-L296, M1-S295, M1-L294, M1-S293, M1-A292, M1-K291, M1-R290, M1-E289, M1-K288, M1-Q287, M1-P286, M1-K285, M1-N284, M1-P283, M1-T282, M1-Q281, M1-P280, M1-L279, M1-F278, M1-F277, M1-F276, M1-P275, M1-I274, M1-S273, M1-S272, M1-I271, M1-I270, M1-S269, M1-F268, M1-L267, M1-G266, M1-S265, M1-V264, M1-L263, M1-F262, M1-N261, M1-L260, M1-W259, M1-W258, M1-A257, M1-G256, M1-V255, M1-W254, M1-R253, M1-S252, M1-D251, M1-T250, M1-P249, M1-T248, M1-I247, M1-R246, M1-I245, M1-T244, M1-S243, M1-L242, M1-D241, M1-V240, M1-Y239, M1-G238, M1-I237, M1-D236, M1-V235, M1-Y234, M1-M233, M1-K232, M1-S231, M1-F230, M1-L229, M1-S228, M1-G227, M1-L226, M1-T225, M1-F224, M1-G223, M1-I222, M1-I221, M1-P220, M1-G219, M1-I218, M1-M217, M1-A216, M1-I215, M1-A214, M1-N213, M1-L212, M1-I211, M1-G210, M1-L209, M1-Y208, M1-L207, M1-S206, M1-S205, M1-H204, M1-G203, M1-E202, M1-K201, M1-A200, M1-F199, M1-D198, M1-D197, M1-I196, M1-Y195, M1-S194, M1-L193, M1-G192, M1-L191, M1-P190, M1-V189, M1-I188, M1-P187, M1-T186, M1-E185, M1-G184, M1-I183, M1-G182, M1-R181, M1-L180, M1-M179, M1-N178, M1-G177, M1-M176, M1-F175, M1-V174, M1-Y173, M1-I172, M1-W171, M1-M170, M1-Y169, M1-S168, M1-G167, M1-S166, M1-E165, M1-K164, M1-L163, M1-C162, M1-G161, M1-K160, M1-G159, M1-V158, M1-I157, M1-E156, M1-P155, M1-S154, M1-A153, M1-R152, M1-N151, M1-L150, M1-S149, M1-L148, M1-I147, M1-Q146, M1-N145, M1-I144, M1-L143, M1-C142, M1-T141, M1-S140, M1-L139, M1-T138, M1-S137, M1-T136, M1-S135, M1-N134, M1-E133, M1-S132, M1-S131, and/or M1-Y488 of SEQ ID NO:12. Polynucleotide sequences encoding these polypeptides are also provided. The present invention also encompasses the use of these C-terminal OATP2 (SNP_ID: PS100s23) deletion polypeptides as immunogenic and/or antigenic epitopes as described elsewhere herein.

[0187] Alternatively, preferred polypeptides of the present invention may comprise polypeptide sequences corresponding to, for example, internal regions of the OATP2 (SNP_ID: PS100s23) polypeptide (e.g., any combination of both N- and C-terminal OATP2 (SNP_ID: PS100s23) polypeptide deletions) of SEQ ID NO:12. For example, internal regions could be defined by the equation: amino acid NX to amino acid CX, wherein NX refers to any N-terminal deletion polypeptide amino acid of OATP2 (SNP_ID: PS100s23) (SEQ ID NO:12), and where CX refers to any C-terminal deletion polypeptide amino acid of OATP2 (SNP_ID: PS100s23) (SEQ ID NO:12). Polynucleotides encoding these polypeptides are also provided. The present invention also encompasses the use of these polypeptides as an immunogenic and/or antigenic epitope as described elsewhere herein. Preferably, the resulting deletion polypeptide comprises the polypeptide polymorphic loci identified elsewhere herein for OATP2 (SNP_ID: PS100s23), and more preferably comprises the polypeptide polymorphic allele identified elsewhere herein for OATP2 (SNP_ID: PS100s23).

### Features of the Polypeptide Encoded by Gene No:5

[0188] The present invention relates to isolated nucleic acid molecules comprising, or alternatively, consisting of all or a portion of the variant allele of the human OATP2, solute carrier family 21 member 6 gene (SNP_ID: PS100s25) (e.g., wherein reference or wildtype OATP2 gene is exemplified by SEQ ID NO:1). Preferred portions are at least 10, preferably at least 20, preferably at least 40, preferably at least 100, contiguous polynucleotides and comprise an “A” at the nucleotide position corresponding to nucleotide 1382 of the OATP2 gene, or a portion of SEQ ID NO:13. Alternatively, preferred portions are at least 10, preferably at least 20, preferably at least 40, preferably at least 100, contiguous polynucleotides and comprise a “G” at the nucleotide position corresponding to nucleotide 1382 of the OATP2 gene, or a portion of SEQ ID NO:13. The invention further relates to isolated gene products, e.g., polypeptides and/or proteins, which are encoded by a nucleic acid molecule comprising all or a portion of the variant allele of the OATP2 gene.

[0189] In one embodiment, the invention relates to a method for predicting the likelihood that an individual will have a disorder associated with an “A” at the nucleotide position corresponding to nucleotide position 1382 of SEQ ID NO:13 (or diagnosing or aiding in the diagnosis of such a disorder) comprising the steps of obtaining a DNA sample from an individual to be assessed and determining the nucleotide present at position 1382 of SEQ ID NO:13. The presence of an “A” at this position indicates that the individual has a greater likelihood of having a disorder associated therewith than an individual having a “G” at that position, or a greater likelihood of having more severe symptoms.

[0190] Conversely, the invention relates to a method for predicting the likelihood that an individual will have a disorder associated with a “G” at the nucleotide position corresponding to nucleotide position 1382 of SEQ ID NO:13 (or diagnosing or aiding in the diagnosis of such a disorder) comprising the steps of obtaining a DNA sample from an individual to be assessed and determining the nucleotide present at position 1382 of SEQ ID NO:13. The presence of a “G” at this position indicates that the individual has a greater likelihood of having a disorder associated therewith than an individual having an “A” at that position, or a greater likelihood of having more severe symptoms.

[0191] Representative disorders which may be detected, diagnosed, identified, treated, prevented, and/or ameliorated by the present invention include, the following, non-limiting diseases and disorders: decreased heptic uptake of administered statins, resistance to beneficial responses of administered statins; resistance to LDL lowering responses to administered statins; resistance to TG lowering responses to administered statins; resistance to HDL elevating responses to administered statins; increased incidence of drug interactions between one or more administered statins; increased incidence of drug and endogenous substance interactions between a statin drug and endogenous substrates of OATP2 including cholate, taurocholate, thyroid hormones T3 and T4, DHEAS, estradiol-17beta-glucuronide, estrone-3-sulfate, prostaglandin E2, thromboxane B2, leukotriene C4, leukotriene E4, and bilirubin and its conjugates; decreased response to HMG-CoA reductase inhibitors; in addition to other disorders referenced herein, which include, for example, any disorder related to high levels of circulating LDL, high levels of TG, and/or low levels of circularing HDL, which include, but are not limited to, cardiovascular diseases, hepatic diseases, angina pectoris, hypertension, heart failure, myocardial infarction, ventricular hypertrophy, vascular diseases, miscrovascular disease, vascular leak syndrome, aneurysm, stroke, embolism, thrombosis, endothelial dysfunction, coronary artery disease, arteriosclerosis, and/or atherosclerosis.

### Features of the Polypeptide Encoded by Gene No:6

[0192] The present invention relates to isolated nucleic acid molecules comprising, or alternatively, consisting of all or a portion of the variant allele of the human OATP2, solute carrier family 21 member 6 gene (SNP_ID: PS100s26) (e.g., wherein reference or wildtype OATP2 gene is exemplified by SEQ ID NO:1). Preferred portions are at least 10, preferably at least 20, preferably at least 40, preferably at least 100, contiguous polynucleotides and comprise a “C” at the nucleotide position corresponding to nucleotide 1334 of the OATP2 gene, or a portion of SEQ ID NO:15. Alternatively, preferred portions are at least 10, preferably at least 20, preferably at least 40, preferably at least 100, contiguous polynucleotides and comprise a “G” at the nucleotide position corresponding to nucleotide 1334 of the OATP2 gene, or a portion of SEQ ID NO:15. The invention further relates to isolated gene products, e.g., polypeptides and/or proteins, which are encoded by a nucleic acid molecule comprising all or a portion of the variant allele of the OATP2 gene.

[0193] In one embodiment, the invention relates to a method for predicting the likelihood that an individual will have a disorder associated with a “C” at the nucleotide position corresponding to nucleotide position 1334 of SEQ ID NO:15 (or diagnosing or aiding in the diagnosis of such a disorder) comprising the steps of obtaining a DNA sample from an individual to be assessed and determining the nucleotide present at position 1334 of SEQ ID NO:15. The presence of a “C” at this position indicates that the individual has a greater likelihood of having a disorder associated therewith than an individual having a “G” at that position, or a greater likelihood of having more severe symptoms.

[0194] Conversely, the invention relates to a method for predicting the likelihood that an individual will have a disorder associated with a “G” at the nucleotide position corresponding to nucleotide position 1334 of SEQ ID NO:15 (or diagnosing or aiding in the diagnosis of such a disorder) comprising the steps of obtaining a DNA sample from an individual to be assessed and determining the nucleotide present at position 1334 of SEQ ID NO:15. The presence of a “G” at this position indicates that the individual has a greater likelihood of having a disorder associated therewith than an individual having a “C” at that position, or a greater likelihood of having more severe symptoms.

[0195] The present invention further relates to isolated proteins or polypeptides comprising, or alternatively, consisting of all or a portion of the encoded variant amino acid sequence of the human human OATP2, solute carrier family 21 member 6 polypeptide (e.g., wherein reference or wildtype human OATP2, solute carrier family 21 member 6 polypeptide is exemplified by SEQ ID NO:2). Preferred portions are at least 10, preferably at least 20, preferably at least 40, preferably at least 100, contiguous polypeptides and comprises a “K” at the amino acid position corresponding to amino acid 400 of the OATP2 polypeptide, or a portion of SEQ ID NO:16. Alternatively, preferred portions are at least 10, preferably at least 20, preferably at least 40, preferably at least 100, contiguous polypeptides and comprises a “F” at the amino acid position corresponding to amino acid 400 of the OATP2 protein, or a portion of SEQ ID NO:16. The invention further relates to isolated nucleic acid molecules encoding such polypeptides or proteins, as well as to antibodies that bind to such proteins or polypeptides.

[0196] Representative disorders which may be detected, diagnosed, identified, treated, prevented, and/or ameliorated by the present invention include, the following, non-limiting diseases and disorders: decreased heptic uptake of administered statins, resistance to beneficial responses of administered statins; resistance to LDL lowering responses to administered statins; resistance to TG lowering responses to administered statins; resistance to HDL elevating responses to administered statins; increased incidence of drug interactions between one or more administered statins; increased incidence of drug and endogenous substance interactions between a statin drug and endogenous substrates of OATP2 including cholate, taurocholate, thyroid hormones T3 and T4, DHEAS, estradiol-17beta-glucuronide, estrone-3-sulfate, prostaglandin E2, thromboxane B2, leukotriene C4, leukotriene E4, and bilirubin and its conjugates; decreased response to HMG-CoA reductase inhibitors; in addition to other disorders referenced herein, which include, for example, any disorder related to high levels of circulating LDL, high levels of TG, and/or low levels of circularing HDL, which include, but are not limited to, cardiovascular diseases, hepatic diseases, angina pectoris, hypertension, heart failure, myocardial infarction, ventricular hypertrophy, vascular diseases, miscrovascular disease, vascular leak syndrome, aneurysm, stroke, embolism, thrombosis, endothelial dysfunction, coronary artery disease, arteriosclerosis, and/or atherosclerosis.

[0197] In preferred embodiments, the following N-terminal OATP2 (SNP_ID: PS100s26) deletion polypeptides are encompassed by the present invention: M1-C691, D2-C691, Q3-C691, N4-C691, Q5-C691, H6-C691, L7-C691, N8-C691, K9-C691, T10-C691, A11-C691, E12-C691, A13-C691, Q14-C691, P15-C691, S16-C691, E17-C691, N18-C691, K19-C691, K20-C691, T21-C691, R22-C691, Y23-C691, C24-C691, N25-C691, G26-C691, L27-C691, K28-C691, M29-C691, F30-C691, L31-C691, A32-C691, A33-C691, L34-C691, S35-C691, L36-C691, S37-C691, F38-C691, I39-C691, A40-C691, K41-C691, T42-C691, L43-C691, G44-C691, A45-C691, I46-C691, I47-C691, M48-C691, K49-C691, S50-C691, S51-C691, I52-C691, I53-C691, H54-C691, I55-C691, E56-C691, R57-C691, R58-C691, F59-C691, E60-C691, I61-C691, S62-C691, S63-C691, S64-C691, L65-C691, V66-C691, G67-C691, F68-C691, I69-C691, D70-C691, G71-C691, S72-C691, F73-C691, E74-C691, I75-C691, G76-C691, N77-C691, L78-C691, L79-C691, V80-C691, I81-C691, V82-C691, F83-C691, V84-C691, S85-C691, Y86-C691, F87-C691, G88-C691, S89-C691, K90-C691, L91-C691, H92-C691, R93-C691, P94-C691, K95-C691, L96-C691, I97-C691, G98-C691, I99-C691, G100-C691, C101-C691, F102-C691, I103-C691, M104-C691, G105-C691, I106-C691, G107-C691, G108-C691, V109-C691, L110-C691, T111-C691, A112-C691, L113-C691, P114-C691, H115-C691, F116-C691, F117-C691, M118-C691, G119-C691, Y120-C691, Y121-C691, R122-C691, Y123-C691, S124-C691, K125-C691, E126-C691, T127-C691, N128-C691, I129-C691, D130-C691, S131-C691, S132-C691, E133-C691, N134-C691, S135-C691, T136-C691, S137-C691, T138-C691, L139-C691, S140-C691, T141-C691, C142-C691, L143-C691, I144-C691, N145-C691, Q146-C691, I147-C691, L148-C691, S149-C691, L150-C691, N151-C691, R152-C691, A153-C691, S154-C691, P155-C691, E156-C691, I157-C691, V158-C691, G159-C691, K160-C691, G161-C691, C162-C691, L163-C691, K164-C691, E165-C691, S166-C691, G167-C691, S168-C691, Y169-C691, M170-C691, W171-C691, I172-C691, Y173-C691, V174-C691, F175-C691, M176-C691, G177-C691, N178-C691, M179-C691, L180-C691, R181-C691, G182-C691, I183-C691, G184-C691, E185-C691, T186-C691, P187-C691, I188-C691, V189-C691, P190-C691, L191-C691, G192-C691, L193-C691, S194-C691, Y195-C691, I196-C691, D197-C691, D198-C691, F199-C691, A200-C691, K201-C691, E202-C691, G203-C691, H204-C691, S205-C691, S206-C691, L207-C691, Y208-C691, L209-C691, G210-C691, I211-C691, L212-C691, N213-C691, A214-C691, I215-C691, A216-C691, M217-C691, I218-C691, G219-C691, P220-C691, I221 -C691, I222-C691, G223-C691, F224-C691, T225-C691, L226-C691, G227-C691, S228-C691, L229-C691, F230-C691, S231 -C691, K232-C691, M233-C691, Y234-C691, V235-C691, D236-C691, I237-C691, G238-C691, Y239-C691, V240-C691, D241 -C691, L242-C691, S243-C691, T244-C691, I245-C691, R246-C691, I247-C691, T248-C691, P249-C691, T250-C691, D251 -C691, S252-C691, R253-C691, W254-C691, V255-C691, G256-C691, A257-C691, W258-C691, W259-C691, L260-C691, N261 -C691, F262-C691, L263-C691, V264-C691, S265-C691, G266-C691, L267-C691, F268-C691, S269-C691, 1270-C691, I271-C691, S272-C691, S273-C691, I274-C691, P275-C691, F276-C691, F277-C691, F278-C691, L279-C691, P280-C691, Q281-C691, T282-C691, P283-C691, N284-C691, K285-C691, P286-C691, Q287-C691, K288-C691, E289-C691, R290-C691, K291-C691, A292-C691, S293-C691, L294-C691, S295-C691, L296-C691, H297-C691, V298-C691, L299-C691, E300-C691, T301 -C691, N302-C691, D303-C691, E304-C691, K305-C691, D306-C691, Q307-C691, T308-C691, A309-C691, N310-C691, L311-C691, T312-C691, N313-C691, Q314-C691, G315-C691, K316-C691, N317-C691, I318-C691, T319-C691, K320-C691, N321-C691, V322-C691, T323-C691, G324-C691, F325-C691, F326-C691, Q327-C691, S328-C691, F329-C691, K330-C691, S331-C691, I332-C691, L333-C691, T334-C691, N335-C691, P336-C691, L337-C691, Y338-C691, V339-C691, M340-C691, F341-C691, V342-C691, L343-C691, L344-C691, T345-C691, L346-C691, L347-C691, Q348-C691, V349-C691, S350-C691, S351-C691, Y352-C691, I353-C691, G354-C691, A355-C691, F356-C691, T357-C691, Y358-C691, V359-C691, F360-C691, K361-C691, Y362-C691, V363-C691, E364-C691, Q365-C691, Q366-C691, Y367-C691, G368-C691, Q369-C691, P370-C691, S371-C691, S372-C691, K373-C691, A374-C691, N375-C691, I376-C691, L377-C691, L378-C691, G379-C691, V380-C691, I381-C691, T382-C691, I383-C691, P384-C691, I385-C691, F386-C691, A387-C691, S388-C691, G389-C691, M390-C691, F391-C691, L392-C691, G393-C691, G394-C691, Y395-C691, I396-C691, I397-C691, K398-C691, K399-C691, and/or K400-C691 of SEQ ID NO:16. Polynucleotide sequences encoding these polypeptides are also provided. The present invention also encompasses the use of these N-terminal OATP2 (SNP_ID: PS100s26) deletion polypeptides as immunogenic and/or antigenic epitopes as described elsewhere herein.

[0198] In preferred embodiments, the following C-terminal OATP2 (SNP_ID: PS100s26) deletion polypeptides are encompassed by the present invention: M1-C691, M1-H690, M1-T689, M1-E688, M1-S687, M1-D686, M1-A685, M1-G684, M1-A683, M1-S682, M1-P681, M1-V680, M1-F679, M1-H678, M1-K677, M1-N676, M1-K675, M1-N674, M1-L673, M1-S672, M1-E671, M1-L670, M1-N669, M1-A668, M1-E667, M1-D666, M1-M665, M1-V664; M1-S663, M1-G662, M1-N661, M1-E660, M1-S659, M1-A658, M1-N657, M1-I656, M1-D655, M1-K654, M1-E653, M1-Q652, M1-Y651, M1-K650, M1-K649, M1-K648, M1-M647, M1-A646, M1-Y645, M1-I644, M1-L643, M1-I642, M1-I641, M1-Y640, M1-V638, M1-L637, M1-S636, M1-S635, M1-V634, M1-R633, M1-L632, M1-M631, M1-S630, M1-S629, M1-L628, M1-G627, M1-L626, M1-Y625, M1-V624, M1-R623, M1-S622, M1-F621, M1-S620, M1-T619, M1-S618, M1-N617, M1-Y616, M1-T615, M1-R614, M1-C613, M1-S612, M1-G611, M1-R610, M1-T609, M1-G608, M1-C607, M1-N606, M1-N605, M1-T604, M1-S603, M1-W602, M1-K601, M1-I600, M1-C599, M1-T598, M1-T597, M1-D596, M1-I595, M1-L594, M1-A593, M1-G592, M1-F591, M1-Y590, M1-I589, M1-P588, M1-A587, M1-L586, M1-I585, M1-G584, M1-G583, M1-L582, M1-A581, M1-R580, M1-I579, M1-V578, M1-M577, M1-S576, M1-H575, M1-F574, M1-G573, M1-L572, M1-A571, M1-L570, M1-S569, M1-K568, M1-L567, M1-E566, M1-P565, M1-Q564, M1-V563, M1-I562, M1-K561, M1-V560, M1-I559, M1-L558, M1-M557, M1-V556, M1-H555, M1-S554, M1-T553, M1-G552, M1-G551, M1-L550, M1-A549, M1-S548, M1-F547, M1-F546, M1-L545, M1-N544, M1-L543, M1-V542, M1-Q541, M1-I540, M1-A539, M1-V538, M1-F537, M1-F536, M1-Y535, M1-F534, M1-K533, M1-R532, M1-T531, M1-C530, M1-A529, M1-D528, M1-D527, M1-R526, M1-P525, M1-C524, M1-E523, M1-G522, M1-L521, M1-H520, M1-A519, M1-S518, M1-Y517, M1-N516, M1-R515, M1-N514, M1-Q513, M1-L512, M1-G511, M1-T510, M1-V509, M1-E508, M1-L507, M1-C506, M1-S505, M1-C504, M1-N503, M1-Y502, M1-F501, M1-V500, M1-I499, M1-P498, M1-K497, M1-K496, M1-N495, M1-G494, M1-S493, M1-S492, M1-S491, M1-K490, M1-C489, M1-G488, M1-A487, M1-L486, M1-C485, M1-P484, M1-S483, M1-I482, M1-Y481, M1-T480, M1-I479, M1-G478, M1-N477, M1-N476, M1-G475, M1-C474, M1-V473, M1-P472, M1-E471, M1-W470, M1-Q469, M1-S468, M1-E467, M1-D466, M1-C465, M1-N464, M1-C463, M1-D462, M1-S461, M1-N460, M1-C459, M1-Y458, M1-S457, M1-L456, M1-P455, M1-V454, M1-D453, M1-R452, M1-H451, M1-S450, M1-T449, M1-V448, M1-P447, M1-N446, M1-N445, M1-G444, M1-D443, M1-Y442, M1-T441, M1-M440, M1-T439, M1-L438, M1-G437, M1-A436, M1-V435, M1-S434, M1-K433, M1-N432, M1-E431, M1-C430, M1-L429, M1-I428, M1-F427, M1-426, M1-Y425, M1-L424, M1-L423, M1-Y422, M1-F421, M1-S420, M1-L419, M1-S418, M1-M417, M1-V416, M1-A415, M1-T414, M1-F413, M1-C412, M1-S411, M1-F410, M1-K409, M1-A408, M1-I407, M1-G406, M1-V405, M1-T404, M1-N403, M1-L402, M1-K401, and/or M1-K400 of SEQ ID NO:16. Polynucleotide sequences encoding these polypeptides are also provided. The present invention also encompasses the use of these C-terminal OATP2 (SNP_ID: PS100s26) deletion polypeptides as immunogenic and/or antigenic epitopes as described elsewhere herein.

[0199] Alternatively, preferred polypeptides of the present invention may comprise polypeptide sequences corresponding to, for example, internal regions of the OATP2 (SNP_ID: PS100s26) polypeptide (e.g., any combination of both N- and C-terminal OATP2 (SNP_ID: PS100s26) polypeptide deletions) of SEQ ID NO:16. For example, internal regions could be defined by the equation: amino acid NX to amino acid CX, wherein NX refers to any N-terminal deletion polypeptide amino acid of OATP2 (SNP_ID: PS100s26) (SEQ ID NO:16), and where CX refers to any C-terminal deletion polypeptide amino acid of OATP2 (SNP_ID: PS100s26) (SEQ ID NO:16). Polynucleotides encoding these polypeptides are also provided. The present invention also encompasses the use of these polypeptides as an immunogenic and/or antigenic epitope as described elsewhere herein. Preferably, the resulting deletion polypeptide comprises the polypeptide polymorphic loci identified elsewhere herein for OATP2 (SNP_ID: PS100s26), and more preferably comprises the polypeptide polymorphic allele identified elsewhere herein for OATP2 (SNP_ID: PS100s26).

### Features of the Polypeptide Encoded by Gene No:7

[0200] The present invention relates to isolated nucleic acid molecules comprising, or alternatively, consisting of all or a portion of the variant allele of the human OATP2, solute carrier family 21 member 6 gene (SNP_ID: PS100s29) (e.g., wherein reference or wildtype OATP2 gene is exemplified by SEQ ID NO:1). Preferred portions are at least 10, preferably at least 20, preferably at least 40, preferably at least 100, contiguous polynucleotides and comprise a “C” at the nucleotide position corresponding to nucleotide 655 of the OATP2 gene, or a portion of SEQ ID NO:17. Alternatively, preferred portions are at least 10, preferably at least 20, preferably at least 40, preferably at least 100, contiguous polynucleotides and comprise a “T” at the nucleotide position corresponding to nucleotide 655 of the OATP2 gene, or a portion of SEQ ID NO:17. The invention further relates to isolated gene products, e.g., polypeptides and/or proteins, which are encoded by a nucleic acid molecule comprising all or a portion of the variant allele of the OATP2 gene.

[0201] In one embodiment, the invention relates to a method for predicting the likelihood that an individual will have a disorder associated with a “C” at the nucleotide position corresponding to nucleotide position 655 of SEQ ID NO:17 (or diagnosing or aiding in the diagnosis of such a disorder) comprising the steps of obtaining a DNA sample from an individual to be assessed and determining the nucleotide present at position 655 of SEQ ID NO:17. The presence of a “C” at this position indicates that the individual has a greater likelihood of having a disorder associated therewith than an individual having a “T” at that position, or a greater likelihood of having more severe symptoms.

[0202] Conversely, the invention relates to a method for predicting the likelihood that an individual will have a disorder associated with a “T” at the nucleotide position corresponding to nucleotide position 655 of SEQ ID NO:17 (or diagnosing or aiding in the diagnosis of such a disorder) comprising the steps of obtaining a DNA sample from an individual to be assessed and determining the nucleotide present at position 655 of SEQ ID NO:17. The presence of a “T” at this position indicates that the individual has a greater likelihood of having a disorder associated therewith than an individual having a “C” at that position, or a greater likelihood of having more severe symptoms.

[0203] The present invention further relates to isolated proteins or polypeptides comprising, or alternatively, consisting of all or a portion of the encoded variant amino acid sequence of the human human OATP2, solute carrier family 21 member 6 polypeptide (e.g., wherein reference or wildtype human OATP2, solute carrier family 21 member 6 polypeptide is exemplified by SEQ ID NO:2). Preferred portions are at least 10, preferably at least 20, preferably at least 40, preferably at least 100, contiguous polypeptides and comprises a “T” at the amino acid position corresponding to amino acid 174 of the OATP2 polypeptide, or a portion of SEQ ID NO:18. Alternatively, preferred portions are at least 10, preferably at least 20, preferably at least 40, preferably at least 100, contiguous polypeptides and comprises a “V” at the amino acid position corresponding to amino acid 174 of the OATP2 protein, or a portion of SEQ ID NO:18. The invention further relates to isolated nucleic acid molecules encoding such polypeptides or proteins, as well as to antibodies that bind to such proteins or polypeptides.

[0204] Representative disorders which may be detected, diagnosed, identified, treated, prevented, and/or ameliorated by the present invention include, the following, non-limiting diseases and disorders: decreased heptic uptake of administered statins, resistance to beneficial responses of administered statins; resistance to LDL lowering responses to administered statins; resistance to TG lowering responses to administered statins; resistance to HDL elevating responses to administered statins; increased incidence of drug interactions between one or more administered statins; increased incidence of drug and endogenous substance interactions between a statin drug and endogenous substrates of OATP2 including cholate, taurocholate, thyroid hormones T3 and T4, DHEAS, estradiol-17beta-glucuronide, estrone-3-sulfate, prostaglandin E2, thromboxane B2, leukotriene C4, leukotriene E4, and bilirubin and its conjugates; decreased response to HMG-CoA reductase inhibitors; in addition to other disorders referenced herein, which include, for example, any disorder related to high levels of circulating LDL, high levels of TG, and/or low levels of circularing HDL, which include, but are not limited to, cardiovascular diseases, hepatic diseases, angina pectoris, hypertension, heart failure, myocardial infarction, ventricular hypertrophy, vascular diseases, miscrovascular disease, vascular leak syndrome, aneurysm, stroke, embolism, thrombosis, endothelial dysfunction, coronary artery disease, arteriosclerosis, and/or atherosclerosis.

[0205] In preferred embodiments, the following N-terminal OATP2 (SNP_ID: PS100s29) deletion polypeptides are encompassed by the present invention: M1-C691, D2-C691, Q3-C691, N4-C691, Q5-C691, H6-C691, L7-C691, N8-C691, K9-C691, T10-C691, A11-C691, E12-C691, A13-C691, Q14-C691, P15-C691, S16-C691, E17-C691, N18-C691, K19-C691, K20-C691, T21-C691, R22-C691, Y23-C691, C24-C691, N25-C691, G26-C691, L27-C691, K28-C691, M29-C691, F30-C691, L31-C691, A32-C691, A33-C691, L34-C691, S35-C691, L36-C691, S37-C691, F38-C691, I39-C691, A40-C691, K41-C691, T42-C691, L43-C691, G44-C691, A45-C691, I46-C691, I47-C691, M48-C691, K49-C691, S50-C691, S51-C691, I52-C691, I53-C691, H54-C691, I55-C691, E56-C691, R57-C691, R58-C691, F59-C691, E60-C691, I61-C691, S62-C691, S63-C691, S64-C691, L65-C691, V66-C691, G67-C691, F68-C691, I69-C691, D70-C691, G71-C691, S72-C691, F73-C691, E74-C691, I75-C691, G76-C691, N77-C691, L78-C691, L79-C691, V80-C691, I81-C691, V82-C691, F83-C691, V84-C691, S85-C691, Y86-C691, F87-C691, G88-C691, S89-C691, K90-C691, L91-C691, H92-C691, R93-C691, P94-C691, K95-C691, K95-C691, L96-C691, I97-C691, G98-C691, I99-C691, G100-C691, C101-C691, F102-C691, I103-C691, M104-C691, G105-C691, I106-C691, G107-C691, G108-C691, V109-C691, L110-C691, T111-C691, A112-C691, L113-C691, P114-C691, H115-C691, F116-C691, F117-C691, M118-C691, G119-C691, Y120-C691, Y121-C691, R122-C691, Y123-C691, S124-C691, K125-C691, E126-C691, T127-C691, N128-C691, I129-C691, D130-C691, S131-C691, S132-C691, E133-C691, N134-C691, S135-C691, T136-C691, S137-C691, T138-C691, L139-C691, S140-C691, T141-C691, C142-C691, L143-C691, I144-C691, N145-C691, Q146-C691, I147-C691, L148-C691, S149-C691, L150-C691, N151-C691, R152-C691, A153-C691, S154-C691, P155-C691, E156-C691, I157-C691, V158-C691, G159-C691, K160-C691, G161-C691, C162-C691, L163-C691, K164-C691, E165-C691, S166-C691, G167-C691, S168-C691, Y169-C691, M170-C691, W171-C691, I172-C691, Y173-C691, and/or A174-C691 of SEQ ID NO:18. Polynucleotide sequences encoding these polypeptides are also provided. The present invention also encompasses the use of these N-terminal OATP2 (SNP_ID: PS100s29) deletion polypeptides as immunogenic and/or antigenic epitopes as described elsewhere herein.

[0206] In preferred embodiments, the following C-terminal OATP2 (SNP_ID: PS100s29) deletion polypeptides are encompassed by the present invention: M1-C691, M1-H690, M1-T689, M1-E688, M1-S687, M1-D686, M1-A685, M1-G684, M1-A683, M1-S682, M1-P681, M1-V680, M1-F679, M1-H678, M1-K677, M1-N676, M1-K675, M1-N674, M1-L673, M1-S672, M1-E671, M1-L670, M1-N669, M1-A668, M1-E667, M1-D666, M1-M665, M1-V664, M1-S663, M1-G662, M1-N661, M1-E660, M1-S659, M1-A658, M1-N657, M1-I656, M1-D655, M1-K654, M1-E653, M1-Q652, M1-Y651, M1-K650, M1-K649, M1-K648, M1-M647, M1-A646, M1-Y645, M1-I644, M1-L643, M1-I642, M1-I641, M1-Y640, M1-L639, M1-V638, M1-L637, M1-S636, M1-S635, M1-V634, M1-R633, M1-L632, M1-M631, M1-S630, M1-S629, M1-L628, M1-G627, M1-L626, M1-Y625, M1-V624, M1-R623, M1-S622, M1-F621, M1-S620, M1-T619, M1-S618, M1-N617, M1-Y616, M1-T615, M1-R614, M1-C613, M1-S612, M1-G611, M1-R610, M1-T609, M1-G608, M1-C607, M1-N606, M1-N605, M1-T604, M1-S603, M1-W602, M1-K601, M1-I600, M1-C599, M1-T598, M1-T597, M1-D596, M1-I595, M1-L594, M1-A593, M1-G592, M1-F591, M1-Y590, M1-I589, M1-P588, M1-A587, M1-L586, M1-I585, M1-G584, M1-G583, M1-L582, M1-A581, M1-R580, M1-I579, M1-V578, M1-M577, M1-S576, M1-H575, M1-F574, M1-G573, M1-L572, M1-A571, M1-L570, M1-S569, M1-K568, M1-L567, M1-E566, M1-P565, M1-Q564, M1-V563, M1-I562, M1-K561, M1-V560, M1-I559, M1-L558; M1-M557, M1-V556, M1-H555, M1-S554, M1-T553, M1-G552, M1-G551, M1-L550, M1-A549, M1-S548, M1-F547, M1-F546, M1-L545, M1-N544, M1-L543, M1-V542, M1-Q541, M1-I540, M1-A539, M1-V538, M1-F537, M1-F536, M1-Y535, M1-F534, M1-K533, M1-R532, M1-T531, M1-C530, M1-A529, M1-D528, M1-D527, M1-R526, M1-P525, M1-C524, M1-E523, M1-G522, M1-L521, M1-H520, M1-A519, M1-S518, M1-Y517, M1-N516, M1-R515, M1-N514, M1-Q513, M1-L512, M1-G511, M1-T510, M1-V509, M1-E508, M1-L507, M1-C506, M1-S505, M1-C504, M1-N503, M1-Y502, M1-F501, M1-V500, M1-I499, M1-P498, M1-K497, M1-K496, M1-N495, M1-G494, M1-S493, M1-S492, M1-S491, M1-K490, M1-C489, M1-G488, M1-A487, M1-L486, M1-C485, M1-P484, M1-S483, M1-I482, M1-Y481, M1-T480, M1-I479, M1-G478, M1-N477, M1-N476, M1-G475, M1-C474, M1-V473, M1-P472, M1-E471, M1-W470, M1-Q469, M1-S468, M1-E467, M1-D466, M1-C465, M1-N464, M1-C463, M1-D462, M1-S461, M1-N460, M1-C459, M1-Y458, M1-S457, M1-L456, M1-P455, M1-V454, M1-D453, M1-R452, M1-H451, M1-S450, M1-T449, M1-V448, M1-P447, M1-N446, M1-N445, M1-G444, M1-D443, M1-Y442, M1-T441, M1-M440, M1-T439, M1-L438, M1-G437, M1-A436, M1-V435, M1-S434, M1-K433, M1-N432, M1-E431, M1-C430, M1-L429, M1-I428, M1-F427, M1-F426, M1-Y425, M1-L424, M1-L423, M1-Y422, M1-F421, M1-S420, M1-L419, M1-S418, M1-M417, M1-V416, M1-A415, M1-T414, M1-F413, M1-C412, M1-S411, M1-F410, M1-K409, M1-A408, M1-I407, M1-G406, M1-V405, M1-T404, M1-N403, M1-L402, M1-K401, M1-F400, M1-K399, M1-K398, M1-I397, M1-I396, M1-Y395, M1-G394, M1-G393, M1-L392, M1-F391, M1-M390, M1-G389, M1-S388, M1-A387, M1-F386, M1-I385, M1-P384, M1-I383, M1-T382, M1-I381,, M1-V380, M1-G379, M1-L378, M1-L377, M1-I376, M1-N375, M1-A374, M1-K373, M1-S372, M1-S371, M1-P370, M1-Q369, M1-G368, M1-Y367, M1-Q366, M1-Q365, M1-E364, M1-V363, M1-Y362, M1-K361, M1-F360, M1-V359, M1-Y358, M1-T357, M1-F356, M1-A355, M1-G354, M1-I353, M1-Y352, M1-S351, M1-S350, M1-V349, M1-Q348, M1-L347, M1-L346, M1-T345, M1-L344, M1-L343, M1-V342, M1-F341, M1-M340, M1-V339, M1-Y338, M1-L337, M1-P336, M1-N335, M1-T334, M1-L333, M1-I332, M1-S331, M1-K330, M1-F329, M1-S328, M1-Q327, M1-F326, M1-F325, M1-G324, M1-T323, M1-V322, M1-N321, M1-K320, M1-T319, M1-I318, M1-N317, M1-K316, M1-G315, M1-Q314, M1-N313, M1-T312, M1-L311, M1-N310, M1-A309, M1-T308, M1-Q307, M1-D306, M1-K305, M1-E304, M1-D303, M1-N302, M1-T301, M1-E300, M1-L299, M1-V298, M1-H297, M1-L296, M1-S295, M1-L294, M1-S293, M1-A292, M1-K291, M1-R290, M1-E289, M1-K288, M1-Q287, M1-P286, M1-K285, M1-N284, M1-P283, M1-T282, M1-Q281, M1-P280, M1-L279, M1-F278, M1-F277, M1-F276, M1-P275, M1-I274, M1-S273, M1-S272, M1-I271, M1-I270, M1-S269, M1-F268, M1-L267, M1-G266, M1-S265, M1-V264, M1-L263, M1-F262, M1-N261, M1-L260, M1-W259, M1-W258, M1-A257, M1-G256, M1-V255, M1-W254, M1-R253, M1-S252, M1-D251, M1-T250, M1-P249, M1-T248, M1-I247, M1-R246, M1-I245, M1-T244, M1-S243, M1-L242, M1-D241, M1-V240, M1-Y239, M1-G238, M1-I237, M1-D236, M1-V235, M1-Y234, M1-M233, M1-K232, M1-S231, M1-F230, M1-L229, M1-S228, M1-G227, M1-L226, M1-T225, M1-F224, M1-G223, M1-I222, M1-I221, M1-P220, M1-G219, M1-I218, M1-M217, M1-A216, M1-I215, M1-A214, M1-N213, M1-L212, M1-I211, M1-G210, M1-L209, M1-Y208, M1-L207, M1-S206, M1-S205, M1-H204, M1-G203, M1-E202, M1-K201, M1-A200, M1-F199, M1-D198, M1-D197, M1-I196, M1-Y195, M1-S194, M1-L193, M1-G192, M1-L191, M1-P190, M1-V189, M1-I188, M1-P187, M1-T186, M1-E185, M1-G184, M1-I183, M1-G182, M1-R181, M1-L180, M1-M179, M1-N178, M1-G177, M1-M176, M1-F175, and/or M1-A174 of SEQ ID NO:18. Polynucleotide sequences encoding these polypeptides are also provided. The present invention also encompasses the use of these C-terminal OATP2 (SNP_ID: PS100s29) deletion polypeptides as immunogenic and/or antigenic epitopes as described elsewhere herein.

[0207] Alternatively, preferred polypeptides of the present invention may comprise polypeptide sequences corresponding to, for example, internal regions of the OATP2 (SNP_ID: PS100s29) polypeptide (e.g., any combination of both N- and C-terminal OATP2 (SNP_ID: PS100s29) polypeptide deletions) of SEQ ID NO:18. For example, internal regions could be defined by the equation: amino acid NX to amino acid CX, wherein NX refers to any N-terminal deletion polypeptide amino acid of OATP2 (SNP_ID: PS100s29) (SEQ ID NO:18), and where CX refers to any C-terminal deletion polypeptide amino acid of OATP2 (SNP_ID: PS100s29) (SEQ ID NO:18). Polynucleotides encoding these polypeptides are also provided. The present invention also encompasses the use of these polypeptides as an immunogenic and/or antigenic epitope as described elsewhere herein. Preferably, the resulting deletion polypeptide comprises the polypeptide polymorphic loci identified elsewhere herein for OATP2 (SNP_ID: PS100s29), and more preferably comprises the polypeptide polymorphic allele identified elsewhere herein for OATP2 (SNP_ID: PS100s29).

### Features of the Polypeptide Encoded by Gene No: 8

[0208] The present invention relates to isolated nucleic acid molecules comprising, or alternatively, consisting of all or a portion of the variant allele of the human OATP2, solute carrier family 21 member 6 gene (SNP_ID: PS100s30) (e.g., wherein reference or wildtype OATP2 gene is exemplified by SEQ ID NO:1). Preferred portions are at least 10, preferably at least 20, preferably at least 40, preferably at least 100, contiguous polynucleotides and comprise a “C” at the nucleotide position corresponding to nucleotide 705 of the OATP2 gene, or a portion of SEQ ID NO:19. Alternatively, preferred portions are at least 10, preferably at least 20, preferably at least 40, preferably at least 100, contiguous polynucleotides and comprise a “T” at the nucleotide position corresponding to nucleotide 705 of the OATP2 gene, or a portion of SEQ ID NO:19. The invention further relates to isolated gene products, e.g., polypeptides and/or proteins, which are encoded by a nucleic acid molecule comprising all or a portion of the variant allele of the OATP2 gene.

[0209] In one embodiment, the invention relates to a method for predicting the likelihood that an individual will have a disorder associated with a “C” at the nucleotide position corresponding to nucleotide position 705 of SEQ ID NO:19 (or diagnosing or aiding in the diagnosis of such a disorder) comprising the steps of obtaining a DNA sample from an individual to be assessed and determining the nucleotide present at position 705 of SEQ ID NO:19. The presence of a “C” at this position indicates that the individual has a greater likelihood of having a disorder associated therewith than an individual having a “T” at that position, or a greater likelihood of having more severe symptoms.

[0210] Conversely, the invention relates to a method for predicting the likelihood that an individual will have a disorder associated with a “T” at the nucleotide position corresponding to nucleotide position 705 of SEQ ID NO:19 (or diagnosing or aiding in the diagnosis of such a disorder) comprising the steps of obtaining a DNA sample from an individual to be assessed and determining the nucleotide present at position 705 of SEQ ID NO:19. The presence of a “T” at this position indicates that the individual has a greater likelihood of having a disorder associated therewith than an individual having a “C” at that position, or a greater likelihood of having more severe symptoms.

[0211] The present invention further relates to isolated proteins or polypeptides comprising, or alternatively, consisting of all or a portion of the encoded variant amino acid sequence of the human human OATP2, solute carrier family 21 member 6 polypeptide (e.g., wherein reference or wildtype human OATP2, solute carrier family 21 member 6 polypeptide is exemplified by SEQ ID NO:2). Preferred portions are at least 10, preferably at least 20, preferably at least 40, preferably at least 100, contiguous polypeptides and comprises a “K” at the amino acid position corresponding to amino acid 191 of the OATP2 polypeptide, or a portion of SEQ ID NO:20. Alternatively, preferred portions are at least 10, preferably at least 20, preferably at least 40, preferably at least 100, contiguous polypeptides and comprises a “L” at the amino acid position corresponding to amino acid 191 of the OATP2 protein, or a portion of SEQ ID NO:20. The invention further relates to isolated nucleic acid molecules encoding such polypeptides or proteins, as well as to antibodies that bind to such proteins or polypeptides.

[0212] Representative disorders which may be detected, diagnosed, identified, treated, prevented, and/or ameliorated by the present invention include, the following, non-limiting diseases and disorders: decreased heptic uptake of administered statins, resistance to beneficial responses of administered statins; resistance to LDL lowering responses to administered statins; resistance to TG lowering responses to administered statins; resistance to HDL elevating responses to administered statins; increased incidence of drug interactions between one or more administered statins; increased incidence of drug and endogenous substance interactions between a statin drug and endogenous substrates of OATP2 including cholate, taurocholate, thyroid hormones T3 and T4, DHEAS, estradiol-17beta-glucuronide, estrone-3-sulfate, prostaglandin E2, thromboxane B2, leukotriene C4, leukotriene E4, and bilirubin and its conjugates; decreased response to HMG-CoA reductase inhibitors; in addition to other disorders referenced herein, which include, for example, any disorder related to high levels of circulating LDL, high levels of TG, and/or low levels of circularing HDL, which include, but are not limited to, cardiovascular diseases, hepatic diseases, angina pectoris, hypertension, heart failure, myocardial infarction, ventricular hypertrophy, vascular diseases, miscrovascular disease, vascular leak syndrome, aneurysm, stroke, embolism, thrombosis, endothelial dysfunction, coronary artery disease, arteriosclerosis, and/or atherosclerosis.

[0213] In preferred embodiments, the following N-terminal OATP2 (SNP-ID: PS100s30) deletion polypeptides are encompassed by the present invention: M1-C691, D2-C691, Q3-C691, N4-C691, Q5-C691, H6-C691, L7-C691, N8-C691, K9-C691, T10-C691, A11-C691, E12-C691, A13-C691, Q14-C691, P15-C691, S16-C691, E17-C691, N18-C691, K19-C691, K20-C691, T21-C691, R22-C691, Y23-C691, C24-C691, N25-C691, G26-C691, L27-C691, K28-C691, M29-C691, F30-C691, L31-C691, A32-C691, A33-C691, L34-C691, S35-C691, L36-C691, S37-C691, F38-C691, I39-C691, A40-C691, K41-C691, T42-C691, L43-C691, G44-C691, A45-C691, I46-C691, I47-C691, M48-C691, K49-C691, S50-C691, S51-C691, I52-C691, I53-C691, H54-C691, I55-C691, E56-C691, R57-C691, R58-C691, F59-C691, E60-C691, I61-C691, S62-C691, S63-C691, S64-C691, L65-C691, V691, G67-C691, F68-C691, I69-C691, D70-C691, G71-C691, S72-C691, F73-C691, E74-C691, I75-C691, G76-C691, N77-C691, L78-C691, L79-C691, V80-C691, I81-C691, V82-C691, F83-C691, V84-C691, S85-C691, Y86-C691, F87-C691, G88-C691, S89-C691, K90-C691, L91-C691, H92-C691, R93-C691, P94-C691, K95-C691, L96-C691, I97-C691, G98-C691, I99-C691, G100-C691, C101-C691, F102-C691, I103-C691, M104-C691, G105-C691, I106-C691, G107-C691, G108-C691, V109-C691, L110-C691, T111-C691, A112-C691, L113-C691, P114-C691, H115-C691, F116-C691, F117-C691, M118-C691, G119-C691, Y120-C691, Y121-C691, R122-C691, Y123-C691, S124-C691, K125-C691, E126-C691, T127-C691, N128-C691, I129-C691, D130-C691, S131-C691, S132-C691, E133-C691, N134-C691, S135-C691, T136-C691, S137-C691, T138-C691, L139-C691, S140-C691, T141-C691, C142-C691, L143-C691, I144-C691, N145-C691, Q146-C691, I147-C691, L148-C691, S149-C691, L150-C691, N151-C691, R152-C691, A153-C691, S154-C691, P155-C691, E156-C691, I157-C691, V158-C691, G159-C691, K160-C691, G161-C691, C162-C691, L163-C691, K164-C691, E165-C691, S166-C691, G167-C691, S168-C691, Y169-C691, M170-C691, W171-C691, I172-C691, Y173-C691, V174-C691, F175-C691, M176-C691, G177-C691, N178-C691, M179-C691, L180-C691, R181-C691, G182-C691, I183-C691, G184-C691, E185-C691, T186-C691, P187-C691, I188-C691, V189-C691, P190-C691, and/or L191-C691 of SEQ ID NO:20. Polynucleotide sequences encoding these polypeptides are also provided. The present invention also encompasses the use of these N-terminal OATP2 (SNP-ID: PS100s30) deletion polypeptides as immunogenic and/or antigenic epitopes as described elsewhere herein.

[0214] In preferred embodiments, the following C-terminal OATP2 (SNP-ID: PS100s30) deletion polypeptides are encompassed by the present invention: M1-C691, M1-H690, M1-T689, M1-E688, M1-S687, M1-D686, M1-A685, M1-G684, M1-A683, M1-S682, M1-P681, M1-V680, M1-F679, M1-H678, M1-K677, M1-N676, M1-K675, M1-N674, M1-L673, M1-S672, M1-E671, M1-L670, M1-N669, M1-A668, M1-E667, M1-D666, M1-M665, M1-V664, M1-S663, M1-G662, M1-N661, M1-E660, M1-S659, M1-A658, M1-N657, M1-I656, M1-D655, M1-K654, M1-E653, M1-Q652, M1-Y651, M1-K650, M1-K649, M1-K648, M1-M647, M1-A646, M1-Y645, M1-I644, M1-L643, M1-I642, M1-I641, M1-Y640, M1-L639, M1-V638, M1-L637, M1-S636, M1-S635, M1-V634, M1-R633, M1-L632, M1-M631, M1-S630, M1-S629, M1-L628, M1-G627, M1-L626, M1-Y625, M1-V624, M1-R623, M1-S622, M1-F621, M1-S620, M1-T619, M1-S618, M1-N617, M1-Y616, M1-T615, M1-R614, M1-C613, M1-S612, M1-G611, M1-R610, M1-T609, M1-G608, M1-C607, M1-N606, M1-N605, M1-T604, M1-S603, M1-W602, M1-K601, M1-I600, M1-C599, M1-T598, M1-T597, M1-D596, M1-I595, M1-L594, M1-A593, M1-G592, M1-F591, M1-Y590, M1-I589, M1-P588, M1-A587, M1-L586, M1-I585, M1-G584, M1-G583, M1-L582, M1-A581, M1-R580, M1-I579, M1-V578, M1-M577, M1-S576, M1-H575, M1-F574, M1-G573, M1-L572, M1-A571, M1-L570, M1-S569, M1-K568, M1-L567, M1-E566, M1-P565, M1-Q564, M1-V563, M1-I562, M1-K561, M1-V560, M1-I559, M1-L558, M1-M557, M1-V556, M1-H555, M1-S554, M1-T553, M1-G552, M1-G551, M1-L550, M1-A549, M1-S548, M1-F547, M1-F546, M1-L545, M1-N544, M1-L543, M1-V542, M1-Q541, M1-I540, M1-A539, M1-V538, M1-F537, M1-F536, M1-Y535, M1-F534, M1-K533, M1-R532, M1-T531, M1-C530, M1-A529, M1-D528, M1-D527, M1-R526, M1-P525, M1-C524, M1-E523, M1-G522, M1-L521, M1-H520, M1-A519, M1-S518, M1-Y517, M1-N516, M1-R515, M1-N514, M1-Q513, M1-L512, M1-G511, M1-T510, M1-V509, M1-E508, M1-L507, M1-C506, M1-S505, M1-C504, M1-N503, M1-Y502, M1-F501, M1-V500, M1-I499, M1-P498, M1-K497, M1-K496, M1-N495, M1-G494, M1-S493, M1-S492, M1-S491, M1-K490, M1-C489, M1-G488, M1-A487, M1-L486, M1-C485, M1-P484, M1-S483, M1-I482, M1-Y481, M1-T480, M1-I479, M1-G478, M1-N477, M1-N476, M1-G475, M1-C474, M1-V473, M1-P472, M1-E471, M1-W470, M1-Q469, M1-S468, M1-E467, M1-D466, M1-C465, M1-N464, M1-C463, M1-D462, M1-S461, M1-N460, M1-C459, M1-Y458, M1-S457, M1-L456, M1-P455, M1-V454, M1-D453, M1-R452, M1-H451, M1-S450, M1-T449, M1-V448, M1-P447, M1-N446, M1-N445, M1-G444, M1-D443, M1-Y442, M1-T441, M1-M440, M1-T439, M1-L438, M1-G437, M1-A436, M1-V435, M1-S434, M1-K433, M1-N432, M1-E431, M1-C430, M1-L429, M1-I428, M1-F427, M1-F426, M1-Y425, M1-L424, M1-L423, M1-Y422, M1-F421, M1-S420, M1-L419, M1-S418, M1-M417, M1-V416, M1-A415, M1-T414, M1-F413, M1-C412, M1-S411, M1-F410, M1-K409, M1-A408, M1-I407, M1-G406, M1-V405, M1-T404, M1-N403, M1-L402, M1-K401, M1-F400, M1-K399, M1-K398, M1-I397, M1-I396, M1-Y395, M1-G394, M1-G393, M1-L392, M1-F391, M1-M390, M1-G389, M1-S388, M1-A387, M1-F386, M1-I385, M1-P384, M1-I383, M1-T382, M1-I381, M1-V380, M1-G379, M1-L378, M1-L377, M1-I376, M1-N375, M1-A374, M1-K373, M1-S372, M1-S371, M1-P370, M1-Q369, M1-G368, M1-Y367, M1-Q366, M1-Q365, M1-E364, M1-V363, M1-Y362, M1-K361, M1-F360, M1-V359, M1-Y358, M1-T357, M1-F356, M1-A355, M1-G354, M1-I353, M1-Y352, M1-S351, M1-S350, M1-V349, M1-Q348, M1-L347, M1-L346, M1-T345, M1-L344, M1-L343, M1-V342, M1-F341, M1-M340, M1-V339, M1-Y338, M1-L337, M1-P336, M1-N335, M1-T334, M1-L333, M1-I332, M1-S331, M1-K330, M1-F329, M1-S328, M1-Q327, M1-F326, M1-F325, M1-G324, M1-T323, M1-V322, M1-N321, M1-K320, M1-T319, M1-I318, M1-N317, M1-K316, M1-G315, M1-Q314, M1-N313, M1-T312, M1-L311, M1-N310, M1-A309, M1-T308, M1-Q307, M1-D306, M1-K305, M1-E304, M1-D303, M1-N302, M1-T301, M1-E300, M1-L299, M1-V298, M1-H297, M1-L296, M1-S295, M1-L294, M1-S293, M1-A292, M1-K291, M1-R290, M1-E289, M1-K288, M1-Q287, M1-P286, M1-K285, M1-N284, M1-P283, M1-T282, M1-Q281, M1-P280, M1-L279, M1-F278, M1-F277, M1-F276, M1-P275, M1-I274, M1-S273, M-1-S272, M1-I271, M1-I270, M1-S269, M1-F268, M1-L267, M1-G266, M1-S265, M1-V264, M1-L263, M1-F262, M1-N261, M1-L260, M1-W259, M1-W258, M1-A257, M1-G256, M1-V255, M1-W254, M1-R253, M1-S252, M1-D251, M1-T250, M1-P249, M1-T248, M1-I247, M1-R246, M1-I245, M1-T244, M1-S243, M1-L242, M1-D241, M1-V240, M1-Y239, M1-G238, M1-I237, M1-D236, M1-V235, M1-Y234, M1-M233, M1-K232, M1-S231, M1-F230, M1-L229, M1-S228, M1-G227, M1-L226, M1-T225, M1-F224, M1 -G223, M1-I222, M1-I221, M1-P220, M1-G219, M1-I218, M1-M217, M1-A216, M1-I215, M1-A214, M1-N213, M1-L212, M1-I211, M-1-G210, M1-L209, M1-Y208, M1-L207, M1-S206, M1-S205, M1-H204, M1-G203, M1-E202, M1-K201, M1-A200, M1-F199, M1-D198, M1-D197, M1-I196, M1-Y195, M1-S194, M1-L193, M1-G192, and/or M1-L191 of SEQ ID NO:20. Polynucleotide sequences encoding these polypeptides are also provided. The present invention also encompasses the use of these C-terminal OATP2 (SNP-ID: PS100s30) deletion polypeptides as immunogenic and/or antigenic epitopes as described elsewhere herein.

[0215] Alternatively, preferred polypeptides of the present invention may comprise polypeptide sequences corresponding to, for example, internal regions of the OATP2 (SNP_ID: PS100s30) polypeptide (e.g., any combination of both N- and C-terminal OATP2 (SNP_ID: PS100s30) polypeptide deletions) of SEQ ID NO:20. For example, internal regions could be defined by the equation: amino acid NX to amino acid CX, wherein NX refers to any N-terminal deletion polypeptide amino acid of OATP2 (SNP_ID: PS100s30) (SEQ ID NO:20), and where CX refers to any C-terminal deletion polypeptide amino acid of OATP2 (SNP_ID: PS100s30) (SEQ ID NO:20). Polynucleotides encoding these polypeptides are also provided. The present invention also encompasses the use of these polypeptides as an immunogenic and/or antigenic epitope as described elsewhere herein. Preferably, the resulting deletion polypeptide comprises the polypeptide polymorphic loci identified elsewhere herein for OATP2 (SNP_ID: PS100s30), and more preferably comprises the polypeptide polymorphic allele identified elsewhere herein for OATP2 (SNP_ID: PS100s30).

### Features of the Polypeptide Encoded by Gene No: 9

[0216] The present invention relates to isolated nucleic acid molecules comprising, or alternatively, consisting of all or a portion of the variant allele of the human OATP2, solute carrier family 21 member 6 gene (SNP_ID: PS100s31) (e.g., wherein reference or wildtype OATP2 gene is exemplified by SEQ ID NO:1). Preferred portions are at least 10, preferably at least 20, preferably at least 40, preferably at least 100, contiguous polynucleotides and comprise a “T at the nucleotide position corresponding to nucleotide 731 of the OATP2 gene, or a portion of SEQ ID NO:21. Alternatively, preferred portions are at least 10, preferably at least 20, preferably at least 40, preferably at least 100, contiguous polynucleotides and comprise a “C” at the nucleotide position corresponding to nucleotide 731 of the OATP2 gene, or a portion of SEQ ID NO:21. The invention further relates to isolated gene products, e.g., polypeptides and/or proteins, which are encoded by a nucleic acid molecule comprising all or a portion of the variant allele of the OATP2 gene.

[0217] In one embodiment, the invention relates to a method for predicting the likelihood that an individual will have a disorder associated with a “T” at the nucleotide position corresponding to nucleotide position 731 of SEQ ID NO:21 (or diagnosing or aiding in the diagnosis of such a disorder) comprising the steps of obtaining a DNA sample from an individual to be assessed and determining the nucleotide present at position 731 of SEQ ID NO:21. The presence of a “T” at this position indicates that the individual has a greater likelihood of having a disorder associated therewith than an individual having a “C” at that position, or a greater likelihood of having more severe symptoms.

[0218] Conversely, the invention relates to a method for predicting the likelihood that an individual will have a disorder associated with a “C” at the nucleotide position corresponding to nucleotide position 731 of SEQ ID NO:21 (or diagnosing or aiding in the diagnosis of such a disorder) comprising the steps of obtaining a DNA sample from an individual to be assessed and determining the nucleotide present at position 731 of SEQ ID NO:21. The presence of a “C” at this position indicates that the individual has a greater likelihood of having a disorder associated therewith than an individual having a “T” at that position, or a greater likelihood of having more severe symptoms.

[0219] Representative disorders which may be detected, diagnosed, identified, treated, prevented, and/or ameliorated by the present invention include, the following, non-limiting diseases and disorders: decreased heptic uptake of administered statins, resistance to beneficial responses of administered statins; resistance to LDL lowering responses to administered statins; resistance to TG lowering responses to administered statins; resistance to HDL elevating responses to administered statins; increased incidence of drug interactions between one or more administered statins; increased incidence of drug and endogenous substance interactions between a statin drug and endogenous substrates of OATP2 including cholate, taurocholate, thyroid hormones T3 and T4, DHEAS, estradiol-17beta-glucuronide, estrone-3-sulfate, prostaglandin E2, thromboxane B2, leukotriene C4, leukotriene E4, and bilirubin and its conjugates; decreased response to HMG-CoA reductase inhibitors; in addition to other disorders referenced herein, which include, for example, any disorder related to high levels of circulating LDL, high levels of TG, and/or low levels of circularing HDL, which include, but are not limited to, cardiovascular diseases, hepatic diseases, angina pectoris, hypertension, heart failure, myocardial infarction, ventricular hypertrophy, vascular diseases, miscrovascular disease, vascular leak syndrome, aneurysm, stroke, embolism, thrombosis, endothelial dysfunction, coronary artery disease, arteriosclerosis, and/or atherosclerosis.

### Features of the Polypeptide Encoded by Gene No: 10

[0220] The present invention relates to isolated nucleic acid molecules comprising, or alternatively, consisting of all or a portion of the variant allele of the human cMOAT, ATP-binding cassette sub-family C member 2 gene (SNP_ID: PS101s1) (e.g., wherein reference or wildtype cMOAT gene is exemplified by SEQ ID NO:1). Preferred portions are at least 10, preferably at least 20, preferably at least 40, preferably at least 100, contiguous polynucleotides and comprise a “G” at the nucleotide position corresponding to nucleotide 3664 of the cMOAT gene, or a portion of SEQ ID NO:23. Alternatively, preferred portions are at least 10, preferably at least 20, preferably at least 40, preferably at least 100, contiguous polynucleotides and comprise a “T” at the nucleotide position corresponding to nucleotide 3664 of the cMOAT gene, or a portion of SEQ ID NO:23. The invention further relates to isolated gene products, e.g., polypeptides and/or proteins, which are encoded by a nucleic acid molecule comprising all or a portion of the variant allele of the cMOAT gene.

[0221] In one embodiment, the invention relates to a method for predicting the likelihood that an individual will have a disorder associated with a “G” at the nucleotide position corresponding to nucleotide position 3664 of SEQ ID NO:23 (or diagnosing or aiding in the diagnosis of such a disorder) comprising the steps of obtaining a DNA sample from an individual to be assessed and determining the nucleotide present at position 3664 of SEQ ID NO:23. The presence of a “G” at this position indicates that the individual has a greater likelihood of having a disorder associated therewith than an individual having a “T” at that position, or a greater likelihood of having more severe symptoms.

[0222] Conversely, the invention relates to a method for predicting the likelihood that an individual will have a disorder associated with a “T” at the nucleotide position corresponding to nucleotide position 3664 of SEQ ID NO:23 (or diagnosing or aiding in the diagnosis of such a disorder) comprising the steps of obtaining a DNA sample from an individual to be assessed and determining the nucleotide present at position 3664 of SEQ ID NO:23. The presence of a “T” at this position indicates that the individual has a greater likelihood of having a disorder associated therewith than an individual having a “G” at that position, or a greater likelihood of having more severe symptoms.

[0223] The present invention further relates to isolated proteins or polypeptides comprising, or alternatively, consisting of all or a portion of the encoded variant amino acid sequence of the human human cMOAT, solute carrier family 21 member 6 polypeptide (e.g., wherein reference or wildtype human cMOAT, solute carrier family 21 member 6 polypeptide is exemplified by SEQ ID NO:2). Preferred portions are at least 10, preferably at least 20, preferably at least 40, preferably at least 100, contiguous polypeptides and comprises a “V” at the amino acid position corresponding to amino acid 1188 of the cMOAT polypeptide, or a portion of SEQ ID NO:24. Alternatively, preferred portions are at least 10, preferably at least 20, preferably at least 40, preferably at least 100, contiguous polypeptides and comprises a “E” at the amino acid position corresponding to amino acid 1188 of the cMOAT protein, or a portion of SEQ ID NO:24. The invention further relates to isolated nucleic acid molecules encoding such polypeptides or proteins, as well as to antibodies that bind to such proteins or polypeptides.

[0224] Representative disorders which may be detected, diagnosed, identified, treated, prevented, and/or ameliorated by the present invention include, the following, non-limiting diseases and disorders: decreased heptic uptake of administered statins, resistance to beneficial responses of administered statins; resistance to LDL lowering responses to administered statins; resistance to TG lowering responses to administered statins; resistance to HDL elevating responses to administered statins; increased incidence of drug interactions between one or more administered statins; increased incidence of drug and endogenous substance interactions between a statin drug and endogenous substrates of cMOAT including cholate, taurocholate, thyroid hormones T3 and T4, DHEAS, estradiol-17beta-glucuronide, estrone-3-sulfate, prostaglandin E2, thromboxane B2, leukotriene C4, leukotriene E4, and bilirubin and its conjugates; decreased response to HMG-CoA reductase inhibitors; in addition to other disorders referenced herein, which include, for example, any disorder related to high levels of circulating LDL, high levels of TG, and/or low levels of circularing HDL, which include, but are not limited to, cardiovascular diseases, hepatic diseases, angina pectoris, hypertension, heart failure, myocardial infarction, ventricular hypertrophy, vascular diseases, miscrovascular disease, vascular leak syndrome, aneurysm, stroke, embolism, thrombosis, endothelial dysfunction, coronary artery disease, arteriosclerosis, and/or atherosclerosis.

[0225] In preferred embodiments, the following N-terminal cMOAT (SNP_ID: PS101s1) deletion polypeptides are encompassed by the present invention: M1-F1545, L2-F1545, E3-F1545, K4-F1545, F5-F1545, C6-F1545, N7-F1545, S8-F1545, T9-F1545, F10-F1545, W11-F1545, N12-F1545, S13-F1545, S14-F1545, F15-F1545, L16-F1545, D17-F1545, S18-F1545, P19-F1545, E20-F1545, A21-F1545, D22-F1545, L23-F1545, P24-F1545, L25-F1545, C26-F1545, F27-F1545, E28-F1545, Q29-F1545, T30-F1545, V31-F1545, L32-F1545, V33-F1545, W34-F1545, I35-F1545, P36-F1545, L37-F1545, G38-F1545, F39-F1545, L40-F1545, W41-F1545, L42-F1545, L43-F1545, A44-F1545, P45-F1545, W46-F1545, Q47-F1545, L48-F1545, L49-F1545, H50-F1545, V51-F1545, Y52-F1545, K53-F1545, S54-F1545, R55-F1545, T56-F1545, K57-F1545, R58-F1545, S59-F1545, S60-F1545, T61-F1545, T62-F1545, K63-F1545, L64-F1545, Y65-F1545, L66-F1545, A67-F1545, K68-F1545, Q69-F1545, V70-F1545, F71-F1545, V72-F1545, G73-F1545, F74-F1545, L75-F1545, L76-F1545, I77-F1545, L78-F1545, A79-F1545, A80-F1545, I81-F1545, E82-F1545, L83-F1545, A84-F1545, L85-F1545, V86-F1545, L87-F1545, T88-F1545, E89-F1545, D90-F1545, S91-F1545, G92-F1545, Q93-F1545, A94-F1545, T95-F1545, V96-F1545, P97-F1545, A98-F1545, V99-F1545, R100-F1545, Y101-F1545, T102-F1545, N103-F1545, P104-F1545, S105-F1545, L106-F1545, Y107-F1545, L108-F1545, G109-F1545, T110-F1545, W111-F1545, L112-F1545, L113-F1545, V114-F1545, L115-F1545, L116-F1545, I117-F1545, Q118-F1545, Y119-F1545, S120-F1545, R121-F1545, Q122-F1545, W123-F1545, C124-F1545, V125-F1545, Q126-F1545, K127-F1545, N128-F1545, S129-F1545, W130-F1545, F131-F1545, L132-F1545, S133-F1545, L134-F1545, F135-F1545, W136-F1545, I137-F1545, L138-F1545, S139-F1545, I140-F1545, L141-F1545, C142-F1545, G143-F1545, T144-F1545, F145-F1545, Q146-F1545, F147-F1545, Q148-F1545, T149-F1545, L150-F1545, I151-F1545, R152-F1545, T153-F1545, L154-F1545, L155-F1545, Q156-F1545, G157-F1545, D158-F1545, N159-F1545, S160-F1545, N161-F1545, L162-F1545, A163-F1545, Y164-F1545, S165-F1545, C166-F1545, L167-F1545, F168-F1545, F169-F1545, I170-F1545, S171-F1545, Y172-F1545, G173-F1545, F174-F1545, Q175-F1545, I176-F1545, L177-F1545, I178-F1545, L179-F1545, I180-F1545, F181-F1545, S182-F1545, A183-F1545, F184-F1545, S185-F1545, E186-F1545, N187-F1545, N188-F1545, E189-F1545, S190-F1545, S191-F1545, N192-F1545, N193-F1545, P194-F1545, S195-F1545, S196-F1545, I197-F1545, A198-F1545, S199-F1545, F200-F1545, L201-F1545, S202-F1545, S203-F1545, I204-F1545, T205-F1545, Y206-F1545, S207-F1545, W208-F1545, Y209-F1545, D210-F1545, S211-F1545, I212-F1545, I213-F1545, L214-F1545, K215-F1545, G216-F1545, Y217-F1545, K218-F1545, R219-F1545, P220-F1545, L221-F1545, T222-F1545, L223-F1545, E224-F1545, D225-F1545, V226-F1545, W227-F1545, E228-F1545, V229-F1545, D230-F1545, E231-F1545, E232-F1545, M233-F1545, K234-F1545, T235-F1545, K236-F1545, T237-F1545, L238-F1545, V239-F1545, S240-F1545, K241-F1545, F242-F1545, E243-F1545, T244-F1545, H245-F1545, M246-F1545, K247-F1545, R248-F1545, E249-F1545, L250-F1545, Q251-F1545, K252-F1545, A253-F1545, R254-F1545, R255-F1545, A256-F1545, L257-F1545, Q258-F1545, R259-F1545, R260-F1545, Q261-F1545, E262-F1545, K263-F1545, S264-F1545, S265-F1545, Q266-F1545, Q267-F1545, N268-F1545, S269-F1545, G270-F1545, A271-F1545, R272-F1545, L273-F1545, P274-F1545, G275-F1545, L276-F1545, N277-F1545, K278-F1545, N279-F1545, Q280-F1545, S281-F1545, Q282-F1545, S283-F1545, Q284-F1545, D285-F1545, A286-F1545, L287-F1545, V288-F1545, L289-F1545, E290-F1545, D291-F1545, V292-F1545, E293-F1545, K294-F1545, K295-F1545, K296-F1545, K297-F1545, K298-F1545, S299-F1545, G300-F1545, T301-F1545, K302-F1545, K303-F1545, D304-F1545, V305-F1545, P306-F1545, K307-F1545, S308-F1545, W309-F1545, L310-F1545, M311-F1545, K312-F1545, A313-F1545, L314-F1545, F315-F1545, K316-F1545, T317-F1545, F318-F1545, Y319-F1545, M320-F1545, V321-F1545, L322-F1545, L323-F1545, K324-F1545, S325-F1545, F326-F1545, L327-F1545, L328-F1545, K329-F1545, L330-F1545, V331-F1545, N332-F1545, D333-F1545, I334-F1545, F335-F1545, T336-F1545, F337-F1545, V338-F1545, S339-F1545, P340-F1545, Q341-F1545, L342-F1545, L343-F1545, K344-F1545, L345-F1545, L346-F1545, I347-F1545, S348-F1545, F349-F1545, A350-F1545, S351-F1545, D352-F1545, R353-F1545, D354-F1545, T355-F1545, Y356-F1545, L357-F1545, W358-F1545, I359-F1545, G360-F1545, Y361-F1545, L362-F1545, C363-F1545, A364-F1545, I365-F1545, L366-F1545, L367-F1545, F368-F1545, T369-F1545, A370-F1545, A371-F1545, L372-F1545, I373-F1545, Q374-F1545, S375-F1545, F376-F1545, C377-F1545, L378-F1545, Q379-F1545, C380-F1545, Y381-F1545, F382-F1545, Q383-F1545, L384-F1545, C385-F1545, F386-F1545, K387-F1545, L388-F1545, G389-F1545, V390-F1545, K391-F1545, V392-F1545, R393-F1545, T394-F1545, A395-F1545, I396-F1545, M397-F1545, A398-F1545, S399-F1545, V400-F1545, Y401-F1545, K402-F1545, K403-F1545, A404-F1545, L405-F1545, T406-F1545, I407-F1545, S408-F1545, N409-F1545, L410-F1545, A411-F1545, R412-F1545, K413-F1545, E414-F1545, Y415-F1545, T416-F1545, V417-F1545, G418-F1545, E419-F1545, T420-F1545, V421-F1545, N422-F1545, L423-F1545, M424-F1545, S425-F1545, V426-F1545, D427-F1545, A428-F1545, Q429-F1545, K430-F1545, L431-F1545, M432-F1545, D433-F1545, V434-F1545, T435-F1545, N436-F1545, F437-F1545, M438-F1545, H439-F1545, M440-F1545, L441-F1545, W442-F1545, S443-F1545, S444-F1545, V445-F1545, L446-F1545, Q447-F1545, I448-F1545, V449-F1545, L450-F1545, S451-F1545, I452-F1545, F453-F1545, F454-F1545, L455-F1545, W456-F1545, R457-F1545, E458-F1545, L459-F1545, G460-F1545, P461-F1545, S462-F1545, V463-F1545, L464-F1545, A465-F1545, G466-F1545, V467-F1545, G468-F1545, V469-F1545, M470-F1545, V471-F1545, L472-F1545, V473-F1545, I474-F1545, P475-F1545, I476-F1545, N477-F1545, A478-F1545, I479-F1545, L480-F1545, S481-F1545, T482-F1545, K483-F1545, S484-F1545, K485-F1545, T486-F1545, I487-F1545, Q488-F1545, V489-F1545, K490-F1545, N491-F1545, M492-F1545, K493-F1545, N494-F1545, K495-F1545, D496-F1545, K497-F1545, R498-F1545, L499-F1545, K500-F1545, I501-F1545, M502-F1545, N503-F1545, E504-F1545, I505-F1545, L506-F1545, S507-F1545, G508-F1545, I509-F1545, K510-F1545, I511-F1545, L512-F1545, K513-F1545, Y514-F1545, F515-F1545, A516-F1545, W517-F1545, E518-F1545, P519-F1545, S520-F1545, F521-F1545, R522-F1545, D523-F1545, Q524-F1545, V525-F1545, Q526-F1545, N527-F1545, L528-F1545, R529-F1545, K530-F1545, K531-F1545, E532-F1545, L533-F1545, K534-F1545, N535-F1545, L536-F1545, L537-F1545, A538-F1545, F539-F1545, S540-F1545, Q541-F1545, L542-F1545, Q543-F1545, C544-F1545, V545-F1545, V546-F1545, I547-F1545, F548-F1545, V549-F1545, F550-F1545, Q551-F1545, L552-F1545, T553-F1545, P554-F1545, V555-F1545, L556-F1545, V557-F1545, S558-F1545, V559-F1545, V560-F1545, T561-F1545, F562-F1545, S563-F1545, V564-F1545, Y565-F1545, V566-F1545, L567-F1545, V568-F1545, D569-F1545, S570-F1545, N571-F1545, N572-F1545, I573-F1545, L574-F1545, D575-F1545, A576-F1545, Q577-F1545, K578-F1545, A579-F1545, F580-F1545, T581-F1545, S582-F1545, I583-F1545, T584-F1545, L585-F1545, F586-F1545, N587-F1545, I588-F1545, L589-F1545, R590-F1545, F591-F1545, P592-F1545, L593-F1545, S594-F1545, M595-F1545, L596-F1545, P597-F1545, M598-F1545, M599-F1545, I600-F1545, S601-F1545, S602-F1545, M603-F1545, L604-F1545, Q605-F1545, A606-F1545, S607-F1545, V608-F1545, S609-F1545, T610-F1545, E611-F1545, R612-F1545, L613-F1545, E614-F1545, K615-F1545, Y616-F1545, L617-F1545, G618-F1545, G619-F1545, D620-F1545, D621-F1545, L622-F1545, D623-F1545, T624-F1545, S625-F1545, A626-F1545, I627-F1545, R628-F1545, H629-F1545, D630-F1545, C631-F1545, N632-F1545, F633-F1545, D634-F1545, K635-F1545, A636-F1545, M637-F1545, Q638-F1545, F639-F1545, S640-F1545, E641-F1545, A642-F1545, S643-F1545, F644-F1545, T645-F1545, W646-F1545, E647-F1545, H648-F1545, D649-F1545, S650-F1545, E651-F1545, A652-F1545, T653-F1545, V654-F1545, R655-F1545, D656-F1545, V657-F1545, N658-F1545, L659-F1545, D660-F1545, I661-F1545, M662-F1545, A663-F1545, G664-F1545, Q665-F1545, L666-F1545, V667-F1545, A668-F1545, V669-F1545, I670-F1545, G671-F1545, P672-F1545, V673-F1545, G674-F1545, S675-F1545, G676-F1545, K677-F1545, S678-F1545, S679-F1545, L680-F1545, I681-F1545, S682-F1545, A683-F1545, M684-F1545, L685-F1545, G686-F1545, E687-F1545, M688-F1545, E689-F1545, N690-F1545, V691-F1545, H692-F1545, G693-F1545, H694-F1545, I695-F1545, T696-F1545, I697-F1545, K698-F1545, G699-F1545, T700-F1545, T701-F1545, A702-F1545, Y703-F1545, V704-F1545, P705-F1545, Q706-F1545, Q707-F1545, S708-F1545, W709-F1545, I710-F1545, Q711-F1545, N712-F1545, G713-F1545, T714-F1545, I715-F1545, K716-F1545, D717-F1545, N718-F1545, I719-F1545, L720-F1545, F721-F1545, G722-F1545, T723-F1545, E724-F1545, F725-F1545, N726-F1545, E727-F1545, K728-F1545, R729-F1545, Y730-F1545, Q731-F1545, Q732-F1545, V733-F1545, L734-F1545, E735-F1545, A736-F1545, C737-F1545, A738-F1545, L739-F1545, L740-F1545, P741-F1545, D742-F1545, L743-F1545, E744-F1545, M745-F1545, L746-F1545, P747-F1545, G748-F1545, G749-F1545, D750-F1545, L751-F1545, A752-F1545, E753-F1545, I754-F1545, G755-F1545, E756-F1545, K757-F1545, G758-F1545, I759-F1545, N760-F1545, L761-F1545, S762-F1545, G763-F1545, G764-F1545, Q765-F1545, K766-F1545, Q767-F1545, R768-F1545, I769-F1545, S770-F1545, L771-F1545, A772-F1545, R773-F1545, A774-F1545, T775-F1545, Y776-F1545, Q777-F1545, N778-F1545, L779-F1545, D780-F1545, I781-F1545, Y782-F1545, L783-F1545, L784-F1545, D785-F1545, D786-F1545, P787-F1545, L788-F1545, S789-F1545, A790-F1545, V791-F1545, D792-F1545, A793-F1545, H794-F1545, V795-F1545, G796-F1545, K797-F1545, H798-F1545, I799-F1545, F800-F1545, N801-F1545, K802-F1545, V803-F1545, L804-F1545, G805-F1545, P806-F1545, N807-F1545, G808-F1545, L809-F1545, L810-F1545, K811-F1545, G812-F1545, K813-F1545, T814-F1545, R815-F1545, L816-F1545, L817-F1545, V818-F1545, T819-F1545, H820-F1545, S821-F1545, M822-F1545, H823-F1545, F824-F1545, L825-F1545, P826-F1545, Q827-F1545, V828-F1545, D829-F1545, E830-F1545, I831-F1545, V832-F1545, V833-F1545, L834-F1545, G835-F1545, N836-F1545, G837-F1545, T838-F1545, I839-F1545, V840-F1545, E841-F1545, K842-F1545, G843-F1545, S844-F1545, Y845-F1545, S846-F1545, A847-F1545, L848-F1545, L849-F1545, A850-F1545, K851-F1545, K852-F1545, G853-F1545, E854-F1545, F855-F1545, A856-F1545, K857-F1545, N858-F1545, L859-F1545, K860-F1545, T861-F1545, F862-F1545, L863-F1545, R864-F1545, H865-F1545, T866-F1545, G867-F1545, P868-F1545, E869-F1545, E870-F1545, E871-F1545, A872-F1545, T873-F1545, V874-F1545, H875-F1545, D876-F1545, G877-F1545, S878-F1545, E879-F1545, E880-F1545, E881-F1545, D882-F1545, D883-F1545, D884-F1545, Y885-F1545, G886-F1545, L887-F1545, I888-F1545, S889-F1545, S890-F1545, V891-F1545, E892-F1545, E893-F1545, I894-F1545, P895-F1545, E896-F1545, D897-F1545, A898-F1545, A899-F1545, S900-F1545, I901-F1545, T902-F1545, M903-F1545, R904-F1545, R905-F1545, E906-F1545, N907-F1545, S908-F1545, F909-F1545, R910-F1545, R911-F1545, T912-F1545, L913-F1545, S914-F1545, R915-F1545, S916-F1545, S917-F1545, R918-F1545, S919-F1545, N920-F1545, G921-F1545, R922-F1545, H923-F1545, L924-F1545, K925-F1545, S926-F1545, L927-F1545, R928-F1545, N929-F1545, S930-F1545, L931-F1545, K932-F1545, T933-F1545, R934-F1545, N935-F1545, V936-F1545, N937-F1545, S938-F1545, L939-F1545, K940-F1545, E941-F1545, D942-F1545, E943-F1545, E944-F1545, L945-F1545, V946-F1545, K947-F1545, G948-F1545, Q949-F1545, K950-F1545, L951-F1545, I952-F1545, K953-F1545, K954-F1545, E955-F1545, F956-F1545, I957-F1545, E958-F1545, T959-F1545, G960-F1545, K961-F1545, V962-F1545, K963-F1545, F964-F1545, S965-F1545, I966-F1545, Y967-F1545, L968-F1545, E969-F1545, Y970-F1545, L971-F1545, Q972-F1545, A973-F1545, I974-F1545, G975-F1545, L976-F1545, F977-F1545, S978-F1545, I979-F1545, F980-F1545, F981-F1545, I982-F1545, I983-F1545, L984-F1545, A985-F1545, F986-F1545, V987-F1545, M988-F1545, N989-F1545, S990-F1545, V991-F1545, A992-F1545, F993-F1545, I994-F1545, G995-F1545, S996-F1545, N997-F1545, L998-F1545, W999-F1545, L1000-F1545, S1001-F1545, A1002-F1545, W1003-F1545, T1004-F1545, S1005-F1545, D1006-F1545, S1007-F1545, K1008-F1545, I1009-F1545, F1010-F1545, N1011-F1545, S1012-F1545, T1013-F1545, D1014-F1545, Y1015-F1545, P1016-F1545, A1017-F1545, S1018-F1545, Q1019-F1545, R1020-F1545, D1021-F1545, M1022-F1545, R1023-F1545, V1024-F1545, G1025-F1545, V1026-F1545, Y1027-F1545, G1028-F1545, A1029-F1545, L1030-F1545, G1031-F1545, L1032-F1545, A1033-F1545, Q1034-F1545, G1035-F1545, I1036-F1545, F1037-F1545, V1038-F1545, F1039-F1545, I1040-F1545, A1041-F1545, H1042-F1545, F1043-F1545, W1044-F1545, S1045-F1545, A1046-F1545, F1047-F1545, G1048-F1545, F1049-F1545, V1050-F1545, H1051-F1545, A1052-F1545, S1053-F1545, N1054-F1545, I1055-F1545, L1056-F1545, H1057-F1545, K1058-F1545, Q1059-F1545, L1060-F1545, L1061-F1545, N1062-F1545, N1063-F1545, I1064-F1545, L1065-F1545, R1066-F1545, A1067-F1545, P1068-F1545, M1069-F1545, R1070-F1545, F1071-F1545, F1072-F1545, D1073-F1545, T1074-F1545, T1075-F1545, P1076-F1545, T1077-F1545, G1078-F1545, R1079-F1545, I1080-F1545, V1081-F1545, N1082-F1545, R1083-F1545, F1084-F1545, A1085-F1545, G1086-F1545, D1087-F1545, I1088-F1545, S1089-F1545, T1090-F1545, V1091-F1545, D1092-F1545, D1093-F1545, T1094-F1545, L1095-F1545, P1096-F1545, Q1097-F1545, S1098-F1545, L1099-F1545, R1100-F1545, S1101-F1545, W1102-F1545, I1103-F1545, T1104-F1545, C1105-F1545, F1106-F1545, L1107-F1545, G1108-F1545, I1109-F1545, I1110-F1545, S1111-F1545, T1112-F1545, L1113-F1545, V1114-F1545, M1115-F1545, I1116-F1545, C1117-F1545, M1118-F1545, A1119-F1545, T1120-F1545, P1121-F1545, V1122-F1545, F1123-F1545, T1124-F1545, I1125-F1545, I1126-F1545, V1127-F1545, I1128-F1545, P1129-F1545, L1130-F1545, G1131-F1545, I1132-F1545, I1133-F1545, Y1134-F1545, V1135-F1545, S1136-F1545, V1137-F1545, Q1138-F1545, M1139-F1545, F1140-F1545, Y1141-F1545, V1142-F1545, S1143-F1545, T1144-F1545, S1145-F1545, R1146-F1545, Q1147-F1545, L1148-F1545, R1149-F1545, R1150-F1545, L1151-F1545, D1152-F1545, S1153-F1545, V1154-F1545, T1155-F1545, R1156-F1545, S1157-F1545, P1158-F1545, I1159-F1545, Y1160-F1545, S1161-F1545, H1162-F1545, F1163-F1545, S1164-F1545, E1165-F1545, T1166-F1545, V1167-F1545, S1168-F1545, G1169-F1545, L1170-F1545, P1171-F1545, V1172-F1545, I1173-F1545, R1174-F1545, A1175-F1545, F1176-F1545, E1177-F1545, H1178-F1545, Q1179-F1545, Q1180-F1545, R1181-F1545, F1182-F1545, L1183-F1545, K1184-F1545, H1185-F1545, N1186-F1545, E1187-F1545, and/or V2188-F1545 of SEQ ID NO:24. Polynucleotide sequences encoding these polypeptides are also provided. The present invention also encompasses the use of these N-terminal cMOAT (SNP_ID: PS101s1) deletion polypeptides as immunogenic and/or antigenic epitopes as described elsewhere herein.

[0226] In preferred embodiments, the following C-terminal cMOAT (SNP_ID: PS101s1) deletion polypeptides are encompassed by the present invention: M1-F1545, M1-K1544, M1-T1543, M1-S1542, M1-N1541, M1-V1540, M1-N1539, M1-E1538, M1-I1537, M1-G1536, M1-A1535, M1-E1534, M1-K1533, M1-A1532, M1-M1531, M1-F1530, M1-Y1529, M1-F1528, M1-P1527, M1-G1526, M1-P1525, M1-I1524, M1-Q1523, M1-L1522, M1-L1521, M1-E1520, M1-E1519, M1-P1518, M1-S1517, M1-G1516, M1-Y1515, M1-E1514, M1-I1513, M1-I1512, M1-K1511, M1-G1510, M1-N1509, M1-D1508, M1-L1507, M1-V1506, M1-M1505, M1-V1504, M1-K1503, M1-D1502, M1-S1501, M1-D1500, M1-M1499, M1-I1498, M1-T1497, M1-H1496, M1-L1495, M1-R1494, M1-H1493, M1-A1492, M1-I1491, M1-T1490, M1-I1489, M1-V1488, M1-T1487, M1-C1486, M1-H1485, M1-A1484, M1-F1483, M1-E1482, M1-N1481, M1-Q1480, M1-I1479, M1-T1478, M1-T1477, M1-Q1476, M1-I1475, M1-L1474, M1-N1473, M1-D1472, M1-T1471, M1-E1470, M1-L1469, M1-D1468, M1-V1467, M1-A1466, M1-A1465, M1-T1464, M1-A1463, M1-E1462, M1-D1461, M1-L1460, M1-V1459, M1-L1458, M1-I1457, M1-K1456, M1-S1455, M1-K1454, M1-R1453, M1-L1452, M1-L1451, M1-A1450, M1-R1449, M1-G1448, M1-L1447, M1-C1446, M1-L1445, M1-L1444, M1-Q1443, M1-R1442, M1-Q1441, M1-G1440, M1-I1439, M1-S1438, M1-L1437, M1-N1436, M1-G1435, M1-G1434, M1-A1433, M1-E1432, M1-T1431, M1-V1430, M1-E1429, M1-H1428, M1-S1427, M1-L1426, M1-G1425, M1-L1424, M1-Q1423, M1-L1422, M1-S1421, M1-A1420, M1-V1419, M1-F1418, M1-S1417, M1-K1416, M1-L1415, M1-H1414, M1-A1413, M1-L1412, M1-E1411, M1-L1410, M1-A1409, M1-K1408, M1-W1407, M1-I1406, M1-E1405, M1-E1404, M1-D1403, M1-S1402, M1-Y1401, M1-N1400, M1-N1399, M1-F1398, M1-P1397, M1-D1396, M1-L1395, M1-N1394, M1-M1393, M1-R1392, M1-L1391, M1-S1390, M1-G1389, M1-S1388, M1-F1387, M1-L1386, M1-I1385, M1-P1384, M1-D1383, M1-Q1382, M1-P1381, M1-I1380, M1-I1379, M1-T1378, M1-L1377, M1-K1376, M1-E1375, M1-R1374, M1-L1373, M1-D1372, M1-H1371, M1-L1370, M1-G1369, M1-I1368, M1-S1367, M1-A1366, M1-I1365, M1-D1364, M1-V1363, M1-G1362, M1-D1361, M1-I1360, M1-I1359, M1-I1358, M1-Q1357, M1-G1356, M1-G1355, M1-A1354, M1-A1353, M1-E1352, M1-L1351, M1-I1350, M1-R1349, M1-F1348, M1-L1347, M1-C1346, M1-N1345, M1-T1344, M1-L1343, M1-S1342, M1-S1341, M1-K1340, M1-G1339, M1-A1338, M1-G1337, M1-T1336, M1-R1335, M1-G1334, M1-V1333, M1-V1332, M1-G1331, M1-I1330, M1-K1329, M1-E1328, M1-M1327, M1-S1326, M1-G1325, M1-I1324, M1-D1323, M1-C1322, M1-T1321, M1-I1320, M1-G1319, M1-R1318, M1-L1317, M1-V1316, M1-L1315, M1-D1314, M1-L1313, M1-E1312, M1-P1311, M1-R1310, M1-Y1309, M1-R1308, M1-V1307, M1-Q1306, M1-Y1305, M1-N1304, M1-N1303, M1-F1302, M1-Q1301, M1-I1300, M1-K1299, M1-G1298, M1-K1297, M1-S1296, M1-P1295, M1-W1294, M1-D1293, M1-P1292, M1-P1291, M1-P1290, M1-R1289, M1-K1288, M1-D1287, M1-T1286, M1-V1285, M1-W1284, M1-P1283, M1-A1282, M1-E1281, M1-N1280, M1-E1279, M1-V1278, M1-K1277, M1-T1276, M1-Y1275, M1-E1274, M1-T1273, M1-I1272, M1-R1271, M1-E1270, M1-V1269, M1-A1268, M1-V1267, M1-I1266, M1-N1265, M1-T1264, M1-E1263, M1-I1262, M1-E1261, M1-S1260, M1-T1259, M1-M1258, M1-R1257, M1-V1256, M1-L1255, M1-W1254, M1-N1253, M1-L1252, M1-T1251, M1-Q1250, M1-T1249, M1-I1248, M1-N1247, M1-L1246, M1-A1245, M1-N1244, M1-S1243, M1-L1242, M1-V1241, M1-F1240, M1-G1239, M1-V1238, M1-T1237, M1-D1236, M1-G1235, M1-S1234, M1-L1233, M1-T1232, M1-D1231, M1-R1230, M1-Y1229, M1-I1228, M1-V1227, M1-M1226, M1-M1225, M1-L1224, M1-A1223, M1-S1222, M1-F1221, M1-F1220, M1-V1219, M1-T1218, M1-L1217, M1-N1216, M1-G1215, M1-V1214, M1-L1213, M1-E1212, M1-L1211, M1-R1210, M1-I1209, M1-A1208, M1-L1207, M1-W1206, M1-R1205, M1-N1204, M1-S1203, M1-T1202, M1-I1201, M1-W1200, M1-S1199, M1-F1198, M1-V1197, M1-C1196, M1-K1195, M1-Q1194, M1-N1193, M1-T1192, M1-D1191, M1-I1190, M1-R1189, and/or M1-V1188 of SEQ ID NO:24. Polynucleotide sequences encoding these polypeptides are also provided. The present invention also encompasses the use of these C-terminal cMOAT (SNP_ID: PS101s1) deletion polypeptides as immunogenic and/or antigenic epitopes as described elsewhere herein.

[0227] Alternatively, preferred polypeptides of the present invention may comprise polypeptide sequences corresponding to, for example, internal regions of the cMOAT (SNP_ID: PS101s1) polypeptide (e.g., any combination of both N- and C-terminal cMOAT (SNP_ID: PS101s1) polypeptide deletions) of SEQ ID NO:24. For example, internal regions could be defined by the equation: amino acid NX to amino acid CX, wherein NX refers to any N-terminal deletion polypeptide amino acid of cMOAT (SNP_ID: PS101s1) (SEQ ID NO:24), and where CX refers to any C-terminal deletion polypeptide amino acid of cMOAT (SNP_ID: PS101s1) (SEQ ID NO:24). Polynucleotides encoding these polypeptides are also provided. The present invention also encompasses the use of these polypeptides as an immunogenic and/or antigenic epitope as described elsewhere herein. Preferably, the resulting deletion polypeptide comprises the polypeptide polymorphic loci identified elsewhere herein for cMOAT (SNP_ID: PS101s1), and more preferably comprises the polypeptide polymorphic allele identified elsewhere herein for cMOAT (SNP_ID: PS101s1).

### Features of the Polypeptide Encoded by Gene No: 11

[0228] The present invention relates to isolated nucleic acid molecules comprising, or alternatively, consisting of all or a portion of the variant allele of the human cMOAT, ATP-binding cassette sub-family C member 2 gene (SNP_ID: PS101s2) (e.g., wherein reference or wildtype cMOAT gene is exemplified by SEQ ID NO:1). Preferred portions are at least 10, preferably at least 20, preferably at least 40, preferably at least 100, contiguous polynucleotides and comprise a “T at the nucleotide position corresponding to nucleotide 4073 of the cMOAT gene, or a portion of SEQ ID NO:25. Alternatively, preferred portions are at least 10, preferably at least 20, preferably at least 40, preferably at least 100, contiguous polynucleotides and comprise a “C” at the nucleotide position corresponding to nucleotide 4073 of the cMOAT gene, or a portion of SEQ ID NO:25. The invention further relates to isolated gene products, e.g., polypeptides and/or proteins, which are encoded by a nucleic acid molecule comprising all or a portion of the variant allele of the cMOAT gene.

[0229] In one embodiment, the invention relates to a method for predicting the likelihood that an individual will have a disorder associated with a “T” at the nucleotide position corresponding to nucleotide position 4073 of SEQ ID NO:25 (or diagnosing or aiding in the diagnosis of such a disorder) comprising the steps of obtaining a DNA sample from an individual to be assessed and determining the nucleotide present at position 4073 of SEQ ID NO:25. The presence of a “T” at this position indicates that the individual has a greater likelihood of having a disorder associated therewith than an individual having a “C” at that position, or a greater likelihood of having more severe symptoms.

[0230] Conversely, the invention relates to a method for predicting the likelihood that an individual will have a disorder associated with a “C” at the nucleotide position corresponding to nucleotide position 4073 of SEQ ID NO:25 (or diagnosing or aiding in the diagnosis of such a disorder) comprising the steps of obtaining a DNA sample from an individual to be assessed and determining the nucleotide present at position 4073 of SEQ ID NO:25. The presence of a “C” at this position indicates that the individual has a greater likelihood of having a disorder associated therewith than an individual having a “T” at that position, or a greater likelihood of having more severe symptoms.

[0231] Representative disorders which may be detected, diagnosed, identified, treated, prevented, and/or ameliorated by the present invention include, the following, non-limiting diseases and disorders: decreased heptic uptake of administered statins, resistance to beneficial responses of administered statins; resistance to LDL lowering responses to administered statins; resistance to TG lowering responses to administered statins; resistance to HDL elevating responses to administered statins; increased incidence of drug interactions between one or more administered statins; increased incidence of drug and endogenous substance interactions between a statin drug and endogenous substrates of cMOAT including cholate, taurocholate, thyroid hormones T3 and T4, DHEAS, estradiol-17beta-glucuronide, estrone-3-sulfate, prostaglandin E2, thromboxane B2, leukotriene C4, leukotriene E4, and bilirubin and its conjugates; decreased response to HMG-CoA reductase inhibitors; in addition to other disorders referenced herein, which include, for example, any disorder related to high levels of circulating LDL, high levels of TG, and/or low levels of circularing HDL, which include, but are not limited to, cardiovascular diseases, hepatic diseases, angina pectoris, hypertension, heart failure, myocardial infarction, ventricular hypertrophy, vascular diseases, miscrovascular disease, vascular leak syndrome, aneurysm, stroke, embolism, thrombosis, endothelial dysfunction, coronary artery disease, arteriosclerosis, and/or atherosclerosis.

### Features of the Polypeptide Encoded by Gene No: 12

[0232] The present invention relates to isolated nucleic acid molecules comprising, or alternatively, consisting of all or a portion of the variant allele of the human cMOAT, ATP-binding cassette sub-family C member 2 -gene (SNP_ID: PS101s4) (e.g., wherein reference or wildtype cMOAT gene is exemplified by SEQ ID NO:1). Preferred portions are at least 10, preferably at least 20, preferably at least 40, preferably at least 100, contiguous polynucleotides and comprise a “T at the nucleotide position corresponding to nucleotide 4211 of the cMOAT gene, or a portion of SEQ ID NO:27. Alternatively, preferred portions are at least 10, preferably at least 20, preferably at least 40, preferably at least 100, contiguous polynucleotides and comprise a “C” at the nucleotide position corresponding to nucleotide 4211 of the cMOAT gene, or a portion of SEQ ID NO:27. The invention further relates to isolated gene products, e.g., polypeptides and/or proteins, which are encoded by a nucleic acid molecule comprising all or a portion of the variant allele of the cMOAT gene.

[0233] In one embodiment, the invention relates to a method for predicting the likelihood that an individual will have a disorder associated with a “T” at the nucleotide position corresponding to nucleotide position 4211 of SEQ ID NO:27 (or diagnosing or aiding in the diagnosis of such a disorder) comprising the steps of obtaining a DNA sample from an individual to be assessed and determining the nucleotide present at position 4211 of SEQ ID NO:27. The presence of a “T” at this position indicates that the individual has a greater likelihood of having a disorder associated therewith than an individual having a “C” at that position, or a greater likelihood of having more severe symptoms.

[0234] Conversely, the invention relates to a method for predicting the likelihood that an individual will have a disorder associated with a “C” at the nucleotide position corresponding to nucleotide position 4211 of SEQ ID NO:27 (or diagnosing or aiding in the diagnosis of such a disorder) comprising the steps of obtaining a DNA sample from an individual to be assessed and determining the nucleotide present at position 4211 of SEQ ID NO:27. The presence of a “C” at this position indicates that the individual has a greater likelihood of having a disorder associated therewith than an individual having a “T” at that position, or a greater likelihood of having more severe symptoms.

[0235] Representative disorders which may be detected, diagnosed, identified, treated, prevented, and/or ameliorated by the present invention include, the following, non-limiting diseases and disorders: decreased heptic uptake of administered statins, resistance to beneficial responses of administered statins; resistance to LDL lowering responses to administered statins; resistance to TG lowering responses to administered statins; resistance to HDL elevating responses to administered statins; increased incidence of drug interactions between one or more administered statins; increased incidence of drug and endogenous substance interactions between a statin drug and endogenous substrates of cMOAT including cholate, taurocholate, thyroid hormones T3 and T4, DHEAS, estradiol-17beta-glucuronide, estrone-3-sulfate, prostaglandin E2, thromboxane B2, leukotriene C4, leukotriene E4, and bilirubin and its conjugates; decreased response to HMG-CoA reductase inhibitors; in addition to other disorders referenced herein, which include, for example, any disorder related to high levels of circulating LDL, high levels of TG, and/or low levels of circularing HDL, which include, but are not limited to, cardiovascular diseases, hepatic diseases, angina pectoris, hypertension, heart failure, myocardial infarction, ventricular hypertrophy, vascular diseases, miscrovascular disease, vascular leak syndrome, aneurysm, stroke, embolism, thrombosis, endothelial dysfunction, coronary artery disease, arteriosclerosis, and/or atherosclerosis.

### Features of the Polypeptide Encoded by Gene No: 13

[0236] The present invention relates to isolated nucleic acid molecules comprising, or alternatively, consisting of all or a portion of the variant allele of the human cMOAT, ATP-binding cassette sub-family C member 2 gene (SNP_ID: PS101s5) (e.g., wherein reference or wildtype cMOAT gene is exemplified by SEQ ID NO:1). Preferred portions are at least 10, preferably at least 20, preferably at least 40, preferably at least 100, contiguous polynucleotides and comprise a “T at the nucleotide position corresponding to nucleotide 4163 of the cMOAT gene, or a portion of SEQ ID NO:29. Alternatively, preferred portions are at least 10, preferably at least 20, preferably at least 40, preferably at least 100, contiguous polynucleotides and comprise a “C” at the nucleotide position corresponding to nucleotide 4163 of the cMOAT gene, or a portion of SEQ ID NO:29. The invention further relates to isolated gene products, e.g., polypeptides and/or proteins, which are encoded by a nucleic acid molecule comprising all or a portion of the variant allele of the cMOAT gene.

[0237] In one embodiment, the invention relates to a method for predicting the likelihood that an individual will have a disorder associated with a “T” at the nucleotide position corresponding to nucleotide position 4163 of SEQ ID NO:29 (or diagnosing or aiding in the diagnosis of such a disorder) comprising the steps of obtaining a DNA sample from an individual to be assessed and determining the nucleotide present at position 4163 of SEQ ID NO:29. The presence of a “T” at this position indicates that the individual has a greater likelihood of having a disorder associated therewith than an individual having a “C” at that position, or a greater likelihood of having more severe symptoms.

[0238] Conversely, the invention relates to a method for predicting the likelihood that an individual will have a disorder associated with a “C” at the nucleotide position corresponding to nucleotide position 4163 of SEQ ID NO:29 (or diagnosing or aiding in the diagnosis of such a disorder) comprising the steps of obtaining a DNA sample from an individual to be assessed and determining the nucleotide present at position 4163 of SEQ ID NO:29. The presence of a “C” at this position indicates that the individual has a greater likelihood of having a disorder associated therewith than an individual having a “T” at that position, or a greater likelihood of having more severe symptoms.

[0239] Representative disorders which may be detected, diagnosed, identified, treated, prevented, and/or ameliorated by the present invention include, the following, non-limiting diseases and disorders: decreased heptic uptake of administered statins, resistance to beneficial responses of administered statins; resistance to LDL lowering responses to administered statins; resistance to TG lowering responses to administered statins; resistance to HDL elevating responses to administered statins; increased incidence of drug interactions between one or more administered statins; increased incidence of drug and endogenous substance interactions between a statin drug and endogenous substrates of cMOAT including cholate, taurocholate, thyroid hormones T3 and T4, DHEAS, estradiol-17beta-glucuronide, estrone-3-sulfate, prostaglandin E2, thromboxane B2, leukotriene C4, leukotriene E4, and bilirubin and its conjugates; decreased response to HMG-CoA reductase inhibitors; in addition to other disorders referenced herein, which include, for example, any disorder related to high levels of circulating LDL, high levels of TG, and/or low levels of circulating HDL, which include, but are not limited to, cardiovascular diseases, hepatic diseases, angina pectoris, hypertension, heart failure, myocardial infarction, ventricular hypertrophy, vascular diseases, miscrovascular disease, vascular leak syndrome, aneurysm, stroke, embolism, thrombosis, endothelial dysfunction, coronary artery disease, arteriosclerosis, and/or atherosclerosis.

### Features of the Polypeptide Encoded by Gene No: 14

[0240] The present invention relates to isolated nucleic acid molecules comprising, or alternatively, consisting of all or a portion of the variant allele of the human cMOAT, ATP-binding cassette sub-family C member 2 gene (SNP_ID: PS101s6) (e.g., wherein reference or wildtype cMOAT gene is exemplified by SEQ ID NO:1). Preferred portions are at least 10, preferably at least 20, preferably at least 40, preferably at least 100, contiguous polynucleotides and comprise an “A” at the nucleotide position corresponding to nucleotide 4511 of the cMOAT gene, or a portion of SEQ ID NO:31. Alternatively, preferred portions are at least 10, preferably at least 20, preferably at least 40, preferably at least 100, contiguous polynucleotides and comprise a “G” at the nucleotide position corresponding to nucleotide 4511 of the cMOAT gene, or a portion of SEQ ID NO:31. The invention further relates to isolated gene products, e.g., polypeptides and/or proteins, which are encoded by a nucleic acid molecule comprising all or a portion of the variant allele of the cMOAT gene.

[0241] In one embodiment, the invention relates to a method for predicting the likelihood that an individual will have a disorder associated with an “A” at the nucleotide position corresponding to nucleotide position 4511 of SEQ ID NO:31 (or diagnosing or aiding in the diagnosis of such a disorder) comprising the steps of obtaining a DNA sample from an individual to be assessed and determining the nucleotide present at position 4511 of SEQ ID NO:31. The presence of an “A” at this position indicates that the individual has a greater likelihood of having a disorder associated therewith than an individual having a “G” at that position, or a greater likelihood of having more severe symptoms.

[0242] Conversely, the invention relates to a method for predicting the likelihood that an individual will have a disorder associated with a “G” at the nucleotide position corresponding to nucleotide position 4511 of SEQ ID NO:31 (or diagnosing or aiding in the diagnosis of such a disorder) comprising the steps of obtaining a DNA sample from an individual to be assessed and determining the nucleotide present at position 4511 of SEQ ID NO:31. The presence of a “G” at this position indicates that the individual has a greater likelihood of having a disorder associated therewith than an individual having an “A” at that position, or a greater likelihood of having more severe symptoms.

[0243] Representative disorders which may be detected, diagnosed, identified, treated, prevented, and/or ameliorated by the present invention include, the following, non-limiting diseases and disorders: decreased heptic uptake of administered statins, resistance to beneficial responses of administered statins; resistance to LDL lowering responses to administered statins; resistance to TG lowering responses to administered statins; resistance to HDL elevating responses to administered statins; increased incidence of drug interactions between one or more administered statins; increased incidence of drug and endogenous substance interactions between a statin drug and endogenous substrates of cMOAT including cholate, taurocholate, thyroid hormones T3 and T4, DHEAS, estradiol-17beta-glucuronide, estrone-3-sulfate, prostaglandin E2, thromboxane B2, leukotriene C4, leukotriene E4, and bilirubin and its conjugates; decreased response to HMG-CoA reductase inhibitors; in addition to other disorders referenced herein, which include, for example, any disorder related to high levels of circulating LDL, high levels of TG, and/or low levels of circularing HDL, which include, but are not limited to, cardiovascular diseases, hepatic diseases, angina pectoris, hypertension, heart failure, myocardial infarction, ventricular hypertrophy, vascular diseases, miscrovascular disease, vascular leak syndrome, aneurysm, stroke, embolism, thrombosis, endothelial dysfunction, coronary artery disease, arteriosclerosis, and/or atherosclerosis.

### Features of the Polypeptide Encoded by Gene No: 15

[0244] The present invention relates to isolated nucleic acid molecules comprising, or alternatively, consisting of all or a portion of the variant allele of the human cMOAT, ATP-binding cassette sub-family C member 2 gene (SNP_ID: PS101s7) (e.g., wherein reference or wildtype cMOAT gene is exemplified by SEQ ID NO:1). Preferred portions are at least 10, preferably at least 20, preferably at least 40, preferably at least 100, contiguous polynucleotides and comprise a “C” at the nucleotide position corresponding to nucleotide 4589 of the cMOAT gene, or a portion of SEQ ID NO:33. Alternatively, preferred portions are at least 10, preferably at least 20, preferably at least 40, preferably at least 100, contiguous polynucleotides and comprise a “T” at the nucleotide position corresponding to nucleotide 4589 of the cMOAT gene, or a portion of SEQ ID NO:33. The invention further relates to isolated gene products, e.g., polypeptides and/or proteins, which are encoded by a nucleic acid molecule comprising all or a portion of the variant allele of the cMOAT gene.

[0245] In one embodiment, the invention relates to a method for predicting the likelihood that an individual will have a disorder associated with a “C” at the nucleotide position corresponding to nucleotide position 4589 of SEQ ID NO:33 (or diagnosing or aiding in the diagnosis of such a disorder) comprising the steps of obtaining a DNA sample from an individual to be assessed and determining the nucleotide present at position 4589 of SEQ ID NO:33. The presence of a “C” at this position indicates that the individual has a greater likelihood of having a disorder associated therewith than an individual having a “T” at that position, or a greater likelihood of having more severe symptoms.

[0246] Conversely, the invention relates to a method for predicting the likelihood that an individual will have a disorder associated with a “T” at the nucleotide position corresponding to nucleotide position 4589 of SEQ ID NO:33 (or diagnosing or aiding in the diagnosis of such a disorder) comprising the steps of obtaining a DNA sample from an individual to be assessed and determining the nucleotide present at position 4589 of SEQ ID NO:33. The presence of a “T” at this position indicates that the individual has a greater likelihood of having a disorder associated therewith than an individual having a “C” at that position, or a greater likelihood of having more severe symptoms.

[0247] Representative disorders which may be detected, diagnosed, identified, treated, prevented, and/or ameliorated by the present invention include, the following, non-limiting diseases and disorders: decreased heptic uptake of administered statins, resistance to beneficial responses of administered statins; resistance to LDL lowering responses to administered statins; resistance to TG lowering responses to administered statins; resistance to HDL elevating responses to administered statins; increased incidence of drug interactions between one or more administered statins; increased incidence of drug and endogenous substance interactions between a statin drug and endogenous substrates of cMOAT including cholate, taurocholate, thyroid hormones T3 and T4, DHEAS, estradiol-17beta-glucuronide, estrone-3-sulfate, prostaglandin E2, thromboxane B2, leukotriene C4, leukotriene E4, and bilirubin and its conjugates; decreased response to HMG-CoA reductase inhibitors; in addition to other disorders referenced herein, which include, for example, any disorder related to high levels of circulating LDL, high levels of TG, and/or low levels of circularing HDL, which include, but are not limited to, cardiovascular diseases, hepatic diseases, angina pectoris, hypertension, heart failure, myocardial infarction, ventricular hypertrophy, vascular diseases, miscrovascular disease, vascular leak syndrome, aneurysm, stroke, embolism, thrombosis, endothelial dysfunction, coronary artery disease, arteriosclerosis, and/or atherosclerosis.

### Features of the Polypeptide Encoded by Gene No: 16

[0248] The present invention relates to isolated nucleic acid molecules comprising, or alternatively, consisting of all or a portion of the variant allele of the human cMOAT, ATP-binding cassette sub-family C member 2 gene (SNP_ID: PS101s100) (e.g., wherein reference or wildtype cMOAT gene is exemplified by SEQ ID NO:1). Preferred portions are at least 10, preferably at least 20, preferably at least 40, preferably at least 100, contiguous polynucleotides and comprise a “T at the nucleotide position corresponding to nucleotide 3643 of the cMOAT gene, or a portion of SEQ ID NO:35. Alternatively, preferred portions are at least 10, preferably at least 20, preferably at least 40, preferably at least 100, contiguous polynucleotides and comprise a “G” at the nucleotide position corresponding to nucleotide 3643 of the cMOAT gene, or a portion of SEQ ID NO:35. The invention further relates to isolated gene products, e.g., polypeptides and/or proteins, which are encoded by a nucleic acid molecule comprising all or a portion of the variant allele of the cMOAT gene.

[0249] In one embodiment, the invention relates to a method for predicting the likelihood that an individual will have a disorder associated with a “T” at the nucleotide position corresponding to nucleotide position 3643 of SEQ ID NO:35 (or diagnosing or aiding in the diagnosis of such a disorder) comprising the steps of obtaining a DNA sample from an individual to be assessed and determining the nucleotide present at position 3643 of SEQ ID NO:35. The presence of a “T” at this position indicates that the individual has a greater likelihood of having a disorder associated therewith than an individual having a “G” at that position, or a greater likelihood of having more severe symptoms.

[0250] Conversely, the invention relates to a method for predicting the likelihood that an individual will have a disorder associated with a “G” at the nucleotide position corresponding to nucleotide position 3643 of SEQ ID NO:35 (or diagnosing or aiding in the diagnosis of such a disorder) comprising the steps of obtaining a DNA sample from an individual to be assessed and determining the nucleotide present at position 3643 of SEQ ID NO:35. The presence of a “G” at this position indicates that the individual has a greater likelihood of having a disorder associated therewith than an individual having a “T” at that position, or a greater likelihood of having more severe symptoms.

[0251] The present invention further relates to isolated proteins or polypeptides comprising, or alternatively, consisting of all or a portion of the encoded variant amino acid sequence of the human human cMOAT, solute carrier family 21 member 6 polypeptide (e.g., wherein reference or wildtype human cMOAT, solute carrier family 21 member 6 polypeptide is exemplified by SEQ ID NO:2). Preferred portions are at least 10, preferably at least 20, preferably at least 40, preferably at least 100, contiguous polypeptides and comprises a “L” at the amino acid position corresponding to amino acid 1181 of the cMOAT polypeptide, or a portion of SEQ ID NO:36. Alternatively, preferred portions are at least 10, preferably at least 20, preferably at least 40, preferably at least 100, contiguous polypeptides and comprises a “R” at the amino acid position corresponding to amino acid 1181 of the cMOAT protein, or a portion of SEQ ID NO:36. The invention further relates to isolated nucleic acid molecules encoding such polypeptides or proteins, as well as to antibodies that bind to such proteins or polypeptides.

[0252] Representative disorders which may be detected, diagnosed, identified, treated, prevented, and/or ameliorated by the present invention include, the following, non-limiting diseases and disorders: decreased heptic uptake of administered statins, resistance to beneficial responses of administered statins; resistance to LDL lowering responses to administered statins; resistance to TG lowering responses to administered statins; resistance to HDL elevating responses to administered statins; increased incidence of drug interactions between one or more administered statins; increased incidence of drug and endogenous substance interactions between a statin drug and endogenous substrates of cMOAT including cholate, taurocholate, thyroid hormones T3 and T4, DHEAS, estradiol-17beta-glucuronide, estrone-3-sulfate, prostaglandin E2, thromboxane B2, leukotriene C4, leukotriene E4, and bilirubin and its conjugates; decreased response to HMG-CoA reductase inhibitors; in addition to other disorders referenced herein, which include, for example, any disorder related to high levels of circulating LDL, high levels of TG, and/or low levels of circularing HDL, which include, but are not limited to, cardiovascular diseases, hepatic diseases, angina pectoris, hypertension, heart failure, myocardial infarction, ventricular hypertrophy, vascular diseases, miscrovascular disease, vascular leak syndrome, aneurysm, stroke, embolism, thrombosis, endothelial dysfunction, coronary artery disease, arteriosclerosis, and/or atherosclerosis.

[0253] In preferred embodiments, the following N-terminal cMOAT (SNP_ID:PS101s10) deletion polypeptides are encompassed by the present invention: M1-F1545, L2-F1545, E3-F1545, K4-F1545, F5-F1545, C6-F1545, N7-F1545, S8-F1545, T9-F1545, F10-F1545, W11-F1545, N12-F1545, S13-F1545, S14-F1545, F15-F1545, L16-F1545, D17-F1545, S18-F1545, P19-F1545, E20-F1545, A21-F1545, D22-F1545, L23-F1545, P24-F1545, L25-F1545, C26-F1545, F27-F1545, E28-F1545, Q29-F1545, T30-F1545, V31-F1545, L32-F1545, V33-F1545, W34-F1545, I35-F1545, P36-F1545, L37-F1545, G38-F1545, F39-F1545, L40-F1545, W41-F1545, L42-F1545, L43-F1545, A44-F1545, P45-F1545, W46-F1545, Q47-F1545, L48-F1545, L49-F1545, H50-F1545, V51-F1545, Y52-F1545, K53-F1545, S54-F1545, R55-F1545, T56-F1545, K57-F1545, R58-F1545, S59-F1545, S60-F1545, T61-F1545, T62-F1545, K63-F1545, L64-F1545, Y65-F1545, L66-F1545, A67-F1545, K68-F1545, Q69-F1545, V70-F1545, F71-F1545, V72-F1545, G73-F1545, F74-F1545, L75-F1545, L76-F1545, I77-F1545, L78-F1545, A79-F1545, A80-F1545, I81-F1545, E82-F1545, L83-F1545, A84-F1545, L85-F1545, V86-F1545, L87-F1545, T88-F1545, E89-F1545, D90-F1545, S91-F1545, G92-F1545, Q93-F1545, A94-F1545, T95-F1545, V96-F1545, P97-F1545, A98-F1545, V99-F1545, R100-F1545, Y101-F1545, T102-F1545, N103-F1545, P104-F1545, S105-F1545, L106-F1545, Y107-F1545, L108-F1545, G109-F1545, T110-F1545, W111-F1545, L112-F1545, L113-F1545, V114-F1545, L115-F1545, L116-F1545, I117-F1545, Q118-F1545, Y119-F1545, S120-F1545, R121-F1545, Q122-F1545, W123-F1545, C124-F1545, V125-F1545, Q126-F1545, K127-F1545, N128-F1545, S129-F1545, W130-F1545, F131-F1545, L132-F1545, S133-F1545, L134-F1545, F135-F1545, W136-F1545, I137-F1545, L138-F1545, S139-F1545, I140-F1545, L141-F1545, C142-F1545, G143-F1545, T144-F1545, F145-F1545, Q146-F1545, F147-F1545, Q148-F1545, T149-F1545, L150-F1545, I151-F1545, R152-F1545, T153-F1545, L154-F1545, L155-F1545, Q156-F1545, G157-F1545, D158-F1545, N159-F1545, S160-F1545, N161-F1545, L162-F1545, A163-F1545, Y164-F1545, S165-F1545, C166-F1545, L167-F1545, F168-F1545, F169-F1545, I170-F1545, S171-F1545, Y172-F1545, G173-F1545, F174-F1545, Q175-F1545, I176-F1545, L177-F1545, I178-F1545, L179-F1545, I180-F1545, F181-F1545, S182-F1545, A183-F1545, F184-F1545, S185-F1545, E186-F1545, N187-F1545, N188-F1545, E189-F1545, S190-F1545, S191-F1545, N192-F1545, N193-F1545, P194-F1545, S195-F1545, S196-F1545, I197-F1545, A198-F1545, S199-F1545, F200-F1545, L201-F1545, S202-F1545, S203-F1545, I204-F1545, T205-F1545, Y206-F1545, S207-F1545, W208-F1545, Y209-F1545, D210-F1545, S211-F1545, I212-F1545, I213-F1545, L214-F1545, K215-F1545, G216-F1545, Y217-F1545, K218-F1545, R219-F1545, P220-F1545, L221-F1545, T222-F1545, L223-F1545, E224-F1545, D225-F1545, V226-F1545, W227-F1545, E228-F1545, V229-F1545, D230-F1545, E231-F1545, E232-F1545, M233-F1545, K234-F1545, T235-F1545, K236-F1545, T237-F1545, L238-F1545, V239-F1545, S240-F1545, K241-F1545, F242-F1545, E243-F1545, T244-F1545, H245-F1545, M246-F1545, K247-F1545, R248-F1545, E249-F1545, L250-F1545, Q251-F1545, K252-F1545, A253-F1545, R254-F1545, R255-F1545, A256-F1545, L257-F1545, Q258-F1545, R259-F1545, R260-F1545, Q261-F1545, E262-F1545, K263-F1545, S264-F1545, S265-F1545, Q266-F1545, Q267-F1545, N268-F1545, S269-F1545, G270-F1545, A271-F1545, R272-F1545, L273-F1545, P274-F1545, G275-F1545, L276-F1545, N277-F1545, K278-F1545, N279-F1545, Q280-F1545, S281-F1545, Q282-F1545, S283-F1545, Q284-F1545, D285-F1545, A286-F1545, L287-F1545, V288-F1545, L289-F1545, E290-F1545, D291-F1545, V292-F1545, E293-F1545, K294-F1545, K295-F1545, K296-F1545, K297-F1545, K298-F1545, S299-F1545, G300-F1545, T301-F1545, K302-F1545, K303-F1545, D304-F1545, V305-F1545, P306-F1545, K307-F1545, S308-F1545, W309-F1545, L310-F1545, M311-F1545, K312-F1545, A313-F1545, L314-F1545, F315-F1545, K316-F1545, T317-F1545, F318-F1545, Y319-F1545, M320-F1545, V321-F1545, L322-F1545, L323-F1545, K324-F1545, S325-F1545, F326-F1545, L327-F1545, L328-F1545, K329-F1545, L330-F1545, V331-F1545, N332-F1545, D333-F1545, I334-F1545, F335-F1545, T336-F1545, F337-F1545, V338-F1545, S339-F1545, P340-F1545, Q341-F1545, L342-F1545, L343-F1545, K344-F1545, L345-F1545, L346-F1545, I347-F1545, S348-F1545, F349-F1545, A350-F1545, S351-F1545, D352-F1545, R353-F1545, D354-F1545, T355-F1545, Y356-F1545, L357-F1545, W358-F1545, I359-F1545, G360-F1545, Y361-F1545, L362-F1545, C363-F1545, A364-F1545, I365-F1545, L366-F1545, L367-F1545, F368-F1545, T369-F1545, A370-F1545, A371-F1545, L372-F1545, I373-F1545, Q374-F1545, S375-F1545, F376-F1545, C377-F1545, L378-F1545, Q379-F1545, C380-F1545, Y381-F1545, F382-F1545, Q383-F1545, L384-F1545, C385-F1545, F386-F1545, K387-F1545, L388-F1545, G389-F1545, V390-F1545, K391-F1545, V392-F1545, R393-F1545, T394-F1545, A395-F1545, I396-F1545, M397-F1545, A398-F1545, S399-F1545, V400-F1545, Y401-F1545, K402-F1545, K403-F1545, A404-F1545, L405-F1545, T406-F1545, L407-F1545, S408-F1545, N409-F1545, L410-F1545, A411-F1545, R412-F1545, K413-F1545, E414-F1545, Y415-F1545, T416-F1545, V417-F1545, G418-F1545, E419-F1545, T420-F1545, V421-F1545, N422-F1545, L423-F1545, M424-F1545, S425-F1545, V426-F1545, D427-F1545, A428-F1545, Q429-F1545, K430-F1545, L431-F1545, M432-F1545, D433-F1545, V434-F1545, T435-F1545, N436-F1545, F437-F1545, M438-F1545, H439-F1545, M440-F1545, L441-F1545, W442-F1545, S443-F1545, S444-F1545, V445-F1545, L446-F1545, Q447-F1545, I448-F1545, V449-F1545, L450-F1545, S451-F1545, I452-F1545, F453-F1545, F454-F1545, L455-F1545, W456-F1545, R457-F1545, E458-F1545, L459-F1545, G460-F1545, P461-F1545, S462-F1545, V463-F1545, L464-F1545, A465-F1545, G466-F1545, V467-F1545, G468-F1545, V469-F1545, M470-F1545, V471-F1545, I472-F1545, V473-F1545, I474-F1545, P475-F1545, I476-F1545, N477-F1545, A478-F1545, I479-F1545, L480-F1545, S481-F1545, T482-F1545, K483-F1545, S484-F1545, K485-F1545, T486-F1545, I487-F1545, Q488-F1545, V489-F1545, K490-F1545, N491-F1545, M492-F1545, K493-F1545, N494-F1545, K495-F1545, D496-F1545, K497-F1545, R498-F1545, L499-F1545, K500-F1545, I501-F1545, M502-F1545, N503-F1545, E504-F1545, I505-F1545, L506-F1545, S507-F1545, G508-F1545, I509-F1545, K510-F1545, I511-F1545, L512-F1545, K513-F1545, Y514-F1545, F515-F1545, A516-F1545, W517-F1545, E518-F1545, P519-F1545, S520-F1545, F521-F1545, R522-F1545, D523-F1545, Q524-F1545, V525-F1545, Q526-F1545, N527-F1545, L528-F1545, R529-F1545, K530-F1545, K531-F1545, E532-F1545, L533-F1545, K534-F1545, N535-F1545, L536-F1545, L537-F1545, A538-F1545, F539-F1545, S540-F1545, Q541-F1545, L542-F1545, Q543-F1545, C544-F1545, V545-F1545, V546-F1545, I547-F1545, F548-F1545, V549-F1545, F550-F1545, Q551-F1545, L552-F1545, T553-F1545, P554-F1545, V555-F1545, L556-F1545, V557-F1545, S558-F1545, V559-F1545, V560-F1545, T561-F1545, F562-F1545, S563-F1545, V564-F1545, Y565-F1545, V566-F1545, L567-F1545, V568-F1545, D569-F1545, S570-F1545, N571-F1545, N572-F1545, I573-F1545, L574-F1545, D575-F1545, A576-F1545, Q577-F1545, K578-F1545, A579-F1545, F580-F1545, T581-F1545, S582-F1545, I583-F1545, T584-F1545, L585-F1545, F586-F1545, N587-F1545, I588-F1545, L589-F1545, R590-F1545, F591-F1545, P592-F1545, L593-F1545, S594-F1545, M595-F1545, L596-F1545, P597-F1545, M598-F1545, M599-F1545, I600-F1545, S601-F1545, S602-F1545, M603-F1545, L604-F1545, Q605-F1545, A606-F1545, S607-F1545, V608-F1545, S609-F1545, T610-F1545, E611-F1545, R612-F1545, L613-F1545, E614-F1545, K615-F1545, Y616-F1545, L617-F1545, G618-F1545, G619-F1545, D620-F1545, D621-F1545, L622-F1545, D623-F1545, T624-F1545, S625-F1545, A626-F1545, I627-F1545, R628-F1545, H629-F1545, D630-F1545, C631-F1545, N632-F1545, F633-F1545, D634-F1545, K635-F1545, A636-F1545, M637-F1545, Q638-F1545, F639-F1545, S640-F1545, E641-F1545, A642-F1545, S643-F1545, F644-F1545, T645-F1545, W646-F1545, E647-F1545, H648-F1545, D649-F1545, S650-F1545, E651-F1545, A652-F1545, T653-F1545, V654-F1545, R655-F1545, D656-F1545, V657-F1545, N658-F1545, L659-F1545, D660-F1545, I661-F1545, M662-F1545, A663-F1545, G664-F1545, Q665-F1545, L666-F1545, V667-F1545, A668-F1545, V669-F1545, I670-F1545, G671-F1545, P672-F1545, V673-F1545, G674-F1545, S675-F1545, G676-F1545, K677-F1545, S678-F1545, S679-F1545, L680-F1545, I681-F1545, S682-F1545, A683-F1545, M684-F1545, L685-F1545, G686-F1545, E687-F1545, M688-F1545, E689-F1545, N690-F1545, V691-F1545, H692-F1545, G693-F1545, H694-F1545, I695-F1545, T696-F1545, I697-F1545, K698-F1545, G699-F1545, T700-F1545, T701-F1545, A702-F1545, Y703-F1545, V704-F1545, P705-F1545, Q706-F1545, Q707-F1545, S708-F1545, W709-F1545, I710-F1545, Q711-F1545, N712-F1545, G713-F1545, T714-F1545, I715-F1545, K716-F1545, D717-F1545, N718-F1545, I719-F1545, L720-F1545, F721-F1545, G722-F1545, T723-F1545, E724-F1545, F725-F1545, N726-F1545, E727-F1545, K728-F1545, R729-F1545, Y730-F1545, Q731-F1545, Q732-F1545, V733-F1545, L734-F1545, E735-F1545, A736-F1545, C737-F1545, A738-F1545, L739-F1545, L740-F1545, P741-F1545, D742-F1545, L743-F1545, E744-F1545, M745-F1545, L746-F1545, P747-F1545, G748-F1545, G749-F1545, D750-F1545, L751-F1545, A752-F1545, E753-F1545, I754-F1545, G755-F1545, E756-F1545, K757-F1545, G758-F1545, I759-F1545, N760-F1545, L761-F1545, S762-F1545, G763-F1545, G764-F1545, Q765-F1545, K766-F1545, Q767-F1545, R768-F1545, I769-F1545, S770-F1545, L771-F1545, A772-F1545, R773-F1545, A774-F1545, T775-F1545, Y776-F1545, Q777-F1545, N778-F1545, L779-F1545, D780-F1545, I781-F1545, Y782-F1545, L783-F1545, L784-F1545, D785-F1545, D786-F1545, P787-F1545, L788-F1545, S789-F1545, A790-F1545, V791-F1545, D792-F1545, A793-F1545, H794-F1545, V795-F1545, G796-F1545, K797-F1545, H798-F1545, I799-F1545, F800-F1545, N801-F1545, K802-F1545, V803-F1545, L804-F1545, G805-F1545, P806-F1545, N807-F1545, G808-F1545, L809-F1545, L810-F1545, K811-F1545, G812-F1545, K813-F1545, T814-F1545, R815-F1545, L816-F1545, L817-F1545, V818-F1545, T819-F1545, H820-F1545, S821-F1545, M822-F1545, H823-F1545, F824-F1545, L825-F1545, P826-F1545, Q827-F1545, V828-F1545, D829-F1545, E830-F1545, I831-F1545, V832-F1545, V833-F1545, L834-F1545, G835-F1545, N836-F1545, G837-F1545, T838-F1545, I839-F1545, V840-F1545, E841-F1545, K842-F1545, G843-F1545, S844-F1545, Y845-F1545, S846-F1545, A847-F1545, L848-F1545, L849-F1545, A850-F1545, K851-F1545, K852-F1545, G853-F1545, E854-F1545, F855-F1545, A856-F1545, K857-F1545, N858-F1545, L859-F1545, K860-F1545, T861-F1545, F862-F1545, L863-F1545, R864-F1545, H865-F1545, T866-F1545, G867-F1545, P868-F1545, E869-F1545, E870-F1545, E871-F1545, A872-F1545, T873-F1545, V874-F1545, H875-F1545, D876-F1545, G877-F1545, S878-F1545, E879-F1545, E880-F1545, E881-F1545, D882-F1545, D883-F1545, D884-F1545, Y885-F1545, G886-F1545, L887-F1545, I888-F1545, S889-F1545, S890-F1545, V891-F1545, E892-F1545, E893-F1545, I894-F1545, P895-F1545, E896-F1545, D897-F1545, A898-F1545, A899-F1545, S900-F1545, I901-F1545, T902-F1545, M903-F1545, R904-F1545, R905-F1545, E906-F1545, N907-F1545, S908-F1545, F909-F1545, R910-F1545, R911-F1545, T912-F1545, L913-F1545, S914-F1545, R915-F1545, S916-F1545, S917-F1545, R918-F1545, S919-F1545, N920-F1545, G921-F1545, R922-F1545, H923-F1545, L924-F1545, K925-F1545, S926-F1545, L927-F1545, R928-F1545, N929-F1545, S930-F1545, L931-F1545, K932-F1545, T933-F1545, R934-F1545, N935-F1545, V936-F1545, N937-F1545, S938-F1545, L939-F1545, K940-F1545, E941-F1545, D942-F1545, E943-F1545, E944-F1545, L945-F1545, V946-F1545, K947-F1545, G948-F1545, Q949-F1545, K950-F1545, L951-F1545, I952-F1545, K953-F1545, K954-F1545, E955-F1545, F956-F1545, I957-F1545, E958-F1545, T959-F1545, G960-F1545, K961-F1545, V962-F1545, K963-F1545, F964-F1545, S965-F1545, I966-F1545, Y967-F1545, L968-F1545, E969-F1545, Y970-F1545, L971-F1545, Q972-F1545, A973-F1545, I974-F1545, G975-F1545, L976-F1545, F977-F1545, S978-F1545, I979-F1545, F980-F1545, F981-F1545, I982-F1545, I983-F1545, L984-F1545, A985-F1545, F986-F1545, V987-F1545, M988-F1545, N989-F1545, S990-F1545, V991-F1545, A992-F1545, F993-F1545, I994-F1545, G995-F1545, S996-F1545, N997-F1545, L998-F1545, W999-F1545, L1000-F1545, S1001-F1545, A1002-F1545, W1003-F1545, T1004-F1545, S1005-F1545, D1006-F1545, S1007-F1545, K1008-F1545, I1009-F1545, F1010-F1545, N1011-F1545, S1012-F1545, T1013-F1545, D1014-F1545, Y1015-F1545, P1016-F1545, A1017-F1545, S1018-F1545, Q1019-F1545, R1020-F1545, D1021-F1545, M1022-F1545, R1023-F1545, V1024-F1545, G1025-F1545, V1026-F1545, Y1027-F1545, G1028-F1545, A1029-F1545, L1030-F1545, G1031-F1545, L1032-F1545, A1033-F1545, Q1034-F1545, G1035-F1545, I1036-F1545, F1037-F1545, V1038-F1545, F1039-F1545, I1040-F1545, A1041-F1545, H1042-F1545, F1043-F1545, W1044-F1545, S1045-F1545, A1046-F1545, F1047-F1545, G1048-F1545, F1049-F1545, V1050-F1545, H1051-F1545, A1052-F1545, S1053-F1545, N1054-F1545, I1055-F1545, L1056-F1545, H1057-F1545, K1058-F1545, Q1059-F1545, L1060-F1545, L1061-F1545, N1062-F1545, N1063-F1545, I1064-F1545, L1065-F1545, R1066-F1545, A1067-F1545, P1068-F1545, M1069-F1545, R1070-F1545, F1071-F1545, F1072-F1545, D1073-F1545, T1074-F1545, T1075-F1545, P1076-F1545, T1077-F1545, G1078-F1545, R1079-F1545, I1080-F1545, V1081-F1545, N1082-F1545, R1083-F1545, F1084-F1545, A1085-F1545, G1086-F1545, D1087-F1545, I1088-F1545, S1089-F1545, T1090-F1545, V1091-F1545, D1092-F1545, D1093-F1545, T1094-F1545, L1095-F1545, P1096-F1545, Q1097-F1545, S1098-F1545, L1099-F1545, R1100-F1545, S1101-F1545, W1102-F1545, I1103-F1545, T1104-F1545, C1105-F1545, F1106-F1545, L1107-F1545, G1108-F1545, I1109-F1545, I1110-F1545, S111-F1545, T1112-F1545, L1113-F1545, V1114-F1545, M1115-F1545, I1116-F1545, C1117-F1545, M1118-F1545, A1119-F1545, T1120-F1545, P1121-F1545, V1122-F1545, F1123-F1545, T1124-F1545, I1125-F1545, I1126-F1545, V1127-F1545, I1128-F1545, P1129-F1545, L1130-F1545, G1131-F1545, I1132-F1545, I1133-F1545, Y1134-F1545, V1135-F1545, S1136-F1545, V1137-F1545, Q1138-F1545, M1139-F1545, F1140-F1545, Y1141-F1545, V1142-F1545, S1143-F1545, T1144-F1545, S1145-F1545, R1146-F1545, Q1147-F1545, L1148-F1545, R1149-F1545, R1150-F1545, L1151-F1545, D1152-F1545, S1153-F1545, V1154-F1545, T1155-F1545, R1156-F1545, S1157-F1545, P1158-F1545, I1159-F1545, Y1160-F1545, S1161-F1545, H1162-F1545, F1163-F1545, S1164-F1545, E1165-F1545, T1166-F1545, V1167-F1545, S1168-F1545, G1169-F1545, L1170-F1545, P1171-F1545, V1172-F1545, I1173-F1545, R1174-F1545, A1175-F1545, F1176-F1545, E1177-F1545, H1178-F1545, Q1179-F1545, Q1180-F1545, and/or L1181-F1545 of SEQ ID NO:36. Polynucleotide sequences encoding these polypeptides are also provided. The present invention also encompasses the use of these N-terminal cMOAT (SNP_ID:PS101s10) deletion polypeptides as immunogenic and/or antigenic epitopes as described elsewhere herein.

[0254] In preferred embodiments, the following C-terminal cMOAT (SNP_ID:PS101s10) deletion polypeptides are encompassed by the present invention: M1-F1545, M1-K1544, M1-T1543, M1-S1542, M1-N1541, M1-V1540, M1-N1539, M1-E1538, M1-I1537, M1-G1536, M1-A1535, M1-E1534, M1-K1533, M1-A1532, M1-M1531, M1-F1530, M1-Y1529, M1-F1528, M1-P1527, M1-G1526, M1-P1525, M1-I1524, M1-Q1523, M1-L1522, M1-L1521, M1-E1520, M1-E1519, M1-P1518, M1-S1517, M1-G1516, M1-Y1515, M1-E1514, M1-I1513, M1-I1512, M1-K1511, M1-G1510, M1-N1509, M1-D1508, M1-L1507, M1-V1506, M1-M1505, M1-V1504, M1-K1503, M1-D1502, M1-S1501, M1-D1500, M1-M1499, M1-I1498, M1-T1497, M1-H1496, M1-L1495, M1-R1494, M1-H1493, M1-A1492, M1-I1491, M1-T1490, M1-I1489, M1-V1488, M1-T1487, M1-C1486, M1-H1485, M1-A1484, M1-F1483, M1-E1482, M1-N1481, M1-Q1480, M1-I1479, M1-T1478, M1-T1477, M1-Q1476, M1-I1475, M1-L1474, M1-N1473, M1-D1472, M1-T1471, M1-E1470, M1-L1469, M1-D1468, M1-V1467, M1-A1466, M1-A1465, M1-T1464, M1-A1463, M1-E1462, M1-D1461, M1-L1460, M1-V1459, M1-L1458, M1-I1457, M1-K1456, M1-S1455, M1-K1454, M1-R1453, M1-L1452, M1-L1451, M1-A1450, M1-R1449, M1-G1448, M1-L1447, M1-C1446, M1-L1445, M1-L1444, M1-Q1443, M1-R1442, M1-Q1441, M1-G1440, M1-I1439, M1-S1438, M1-L1437, M1-N1436, M1-G1435, M1-G1434, M1-A1433, M1-E1432, M1-T1431, M1-V1430, M1-E1429, M1-H1428, M1-S1427, M1-L1426, M1-G1425, M1-L1424, M1-Q1423, M1-L1422, M1-S1421, M1-A1420, M1-V1419, M1-F1418, M1-S1417, M1-K1416, M1-L1415, M1-H1414, M1-A1413, M1-L1412, M1-E1411, M1-L1410, M1-A1409, M1-K1408, M1-W1407, M1-I1406, M1-E1405, M1-E1404, M1-D1403, M1-S1402, M1-Y1401, M1-N1400, M1-N1399, M1-F1398, M1-P1397, M1-D1396, M1-L1395, M1-N1394, M1-M1393, M1-R1392, M1-L1391, M1-S1390, M1-G1389, M1-S1388, M1-F1387, M1-L1386, M1-I1385, M1-P1384, M1-D1383, M1-Q1382, M1-P1381, M1-I1380, M1-I1379, M1-T1378, M1-L1377, M1-K1376, M1-E1375, M1-R1374, M1-L1373, M1-D1372, M1-H1371, M1-L1370, M1-G1369, M1-I1368, M1-S1367, M1-A1366, M1-I1365, M1-D1364, M1-V1363, M1-G1362, M1-D1361, M1-I1360, M1-I1359, M1-I1358, M1-Q1357, M1-G1356, M1-G1355, M1-A1354, M1-A1353, M1-E1352, M1-L1351, M1-I1350, M1-R1349, M1-F1348, M1-L1347, M1-C1346, M1-N1345, M1-T1344, M1-L1343, M1-S1342, M1-S1341, M1-K1340, M1-G1339, M1-A1338, M1-G1337, M1-T1336, M1-R1335, M1-G1334, M1-V1333, M1-V1332, M1-G1331, M1-I1330, M1-K1329, M1-E1328, M1-M1327, M1-S1326, M1-G1325, M1-I1324, M1-D1323, M1-C1322, M1-T1321, M1-I1320, M1-G1319, M1-R1318, M1-L1317, M1-V1316, M1-L1315, M1-D1314, M1-L1313, M1-E1312, M1-P1311, M1-R1310, M1-Y1309, M1-R1308, M1-V1307, M1-Q1306, M1-Y1305, M1-N1304, M1-N1303, M1-F1302, M1-Q1301, M1-I1300, M1-K1299, M1-G1298, M1-K1297, M1-S1296, M1-P1295, M1-W1294, M1-D1293, M1-P1292, M1-P1291, M1-P1290, M1-R1289, M1-K1288, M1-D1287, M1-T1286, M1-V1285, M1-W1284, M1-P1283, M1-A1282, M1-E1281, M1-N1280, M1-E1279, M1-V1278, M1-K1277, M1-T1276, M1-Y1275, M1-E1274, M1-T1273, M1-I1272, M1-R1271, M1-E1270, M1-V1269, M1-A1268, M1-V1267, M1-I1266, M1-N1265, M1-T1264, M1-E1263, M1-I1262, M1-E1261, M1-S1260, M1-T1259, M1-M1258, M1-R1257, M1-V1256, M1-L1255, M1-W1254, M1-N1253, M1-L1252, M1-T1251, M1-Q1250, M1-T1249, M1-I1248, M1-N1247, M1-L1246, M1-A1245, M1-N1244, M1-S1243, M1-L1242, M1-V1241, M1-F1240, M1-G1239, M1-V1238, M1-T1237, M1-D1236, M1-G1235, M1-S1234, M1-L1233, M1-T1232, M1-D1231, M1-R1230, M1-Y1229, M1-I1228, M1-V1227, M1-M1226, M1-M1225, M1-L1224, M1-A1223, M1-S1222, M1-F1221, M1-F1220, M1-V1219, M1-T1218, M1-L1217, M1-N1216, M1-G1215, M1-V1214, M1-L1213, M1-E1212, M1-L1211, M1-R1210, M1-I1209, M1-A1208, M1-L1207, M1-W1206, M1-R1205, M1-N1204, M1-S1203, M1-T1202, M1-I1201, M1-W1200, M1-S1199, M1-F1198, M1-V1197, M1-C1196, M1-K1195, M1-Q1194, M1-N1193, M1-T1192, M1-D1191, M1-I1190, M1-R1189, M1-E1188, M1-E1187, M1-N1186, M1-H1185, M1-K1184, M1-L1183, M1-F1182, and/or M1-L1181 of SEQ ID NO:36. Polynucleotide sequences encoding these polypeptides are also provided. The present invention also encompasses the use of these C-terminal cMOAT (SNP_ID:PS101s10) deletion polypeptides as immunogenic and/or antigenic epitopes as described elsewhere herein.

[0255] Alternatively, preferred polypeptides of the present invention may comprise polypeptide sequences corresponding to, for example, internal regions of the cMOAT (SNP_ID: PS101s10) polypeptide (e.g., any combination of both N- and C-terminal cMOAT (SNP_ID: PS101s10) polypeptide deletions) of SEQ ID NO:36. For example, internal regions could be defined by the equation: amino acid NX to amino acid CX, wherein NX refers to any N-terminal deletion polypeptide amino acid of cMOAT (SNP_ID: PS101s10) (SEQ ID NO:36), and where CX refers to any C-terminal deletion polypeptide amino acid of cMOAT (SNP_ID: PS101s10) (SEQ ID NO:36). Polynucleotides encoding these polypeptides are also provided. The present invention also encompasses the use of these polypeptides as an immunogenic and/or antigenic epitope as described elsewhere herein. Preferably, the resulting deletion polypeptide comprises the polypeptide polymorphic loci identified elsewhere herein for cMOAT (SNP_ID: PS101s10), and more preferably comprises the polypeptide polymorphic allele identified elsewhere herein for cMOAT (SNP_ID: PS101s10).

### Features of the Polypeptide Encoded by Gene No: 17

[0256] The present invention relates to isolated nucleic acid molecules comprising, or alternatively, consisting of all or a portion of the variant allele of the human cMOAT, ATP-binding cassette sub-family C member 2 gene (SNP_ID: PS101s110) (e.g., wherein reference or wildtype cMOAT gene is exemplified by SEQ ID NO:1). Preferred portions are at least 10, preferably at least 20, preferably at least 40, preferably at least 100, contiguous polynucleotides and comprise a “G” at the nucleotide position corresponding to nucleotide 2983 of the cMOAT gene, or a portion of SEQ ID NO:37. Alternatively, preferred portions are at least 10, preferably at least 20, preferably at least 40, preferably at least 100, contiguous polynucleotides and comprise an “A” at the nucleotide position corresponding to nucleotide 2983 of the cMOAT gene, or a portion of SEQ ID NO:37. The invention further relates to isolated gene products, e.g., polypeptides and/or proteins, which are encoded by a nucleic acid molecule comprising all or a portion of the variant allele of the cMOAT gene.

[0257] In one embodiment, the invention relates to a method for predicting the likelihood that an individual will have a disorder associated with a “G” at the nucleotide position corresponding to nucleotide position 2983 of SEQ ID NO:37 (or diagnosing or aiding in the diagnosis of such a disorder) comprising the steps of obtaining a DNA sample from an individual to be assessed and determining the nucleotide present at position 2983 of SEQ ID NO:37. The presence of a “G” at this position indicates that the individual has a greater likelihood of having a disorder associated therewith than an individual having an “A” at that position, or a greater likelihood of having more severe symptoms.

[0258] Conversely, the invention relates to a method for predicting the likelihood that an individual will have a disorder associated with an “A” at the nucleotide position corresponding to nucleotide position 2983 of SEQ ID NO:37 (or diagnosing or aiding in the diagnosis of such a disorder) comprising the steps of obtaining a DNA sample from an individual to be assessed and determining the nucleotide present at position 2983 of SEQ ID NO:37. The presence of an “A” at this position indicates that the individual has a greater likelihood of having a disorder associated therewith than an individual having a “G” at that position, or a greater likelihood of having more severe symptoms.

[0259] The present invention further relates to isolated proteins or polypeptides comprising, or alternatively, consisting of all or a portion of the encoded variant amino acid sequence of the human human cMOAT, solute carrier family 21 member 6 polypeptide (e.g., wherein reference or wildtype human cMOAT, solute carrier family 21 member 6 polypeptide is exemplified by SEQ ID NO:2). Preferred portions are at least 10, preferably at least 20, preferably at least 40, preferably at least 100, contiguous polypeptides and comprises a “R” at the amino acid position corresponding to amino acid 961 of the cMOAT polypeptide, or a portion of SEQ ID NO:38. Alternatively, preferred portions are at least 10, preferably at least 20, preferably at least 40, preferably at least 100, contiguous polypeptides and comprises a “K” at the amino acid position corresponding to amino acid 961 of the cMOAT protein, or a portion of SEQ ID NO:38. The invention further relates to isolated nucleic acid molecules encoding such polypeptides or proteins, as well as to antibodies that bind to such proteins or polypeptides.

[0260] Representative disorders which may be detected, diagnosed, identified, treated, prevented, and/or ameliorated by the present invention include, the following, non-limiting diseases and disorders: decreased heptic uptake of administered statins, resistance to beneficial responses of administered statins; resistance to LDL lowering responses to administered statins; resistance to TG lowering responses to administered statins; resistance to HDL elevating responses to administered statins; increased incidence of drug interactions between one or more administered statins; increased incidence of drug and endogenous substance interactions between a statin drug and endogenous substrates of cMOAT including cholate, taurocholate, thyroid hormones T3 and T4, DHEAS, estradiol-17beta-glucuronide, estrone-3-sulfate, prostaglandin E2, thromboxane B2, leukotriene C4, leukotriene E4, and bilirubin and its conjugates; decreased response to HMG-CoA reductase inhibitors; in addition to other disorders referenced herein, which include, for example, any disorder related to high levels of circulating LDL, high levels of TG, and/or low levels of circularing HDL, which include, but are not limited to, cardiovascular diseases, hepatic diseases, angina pectoris, hypertension, heart failure, myocardial infarction, ventricular hypertrophy, vascular diseases, miscrovascular disease, vascular leak syndrome, aneurysm, stroke, embolism, thrombosis, endothelial dysfunction, coronary artery disease, arteriosclerosis, and/or atherosclerosis.

[0261] In preferred embodiments, the following N-terminal cMOAT (SNP_ID:PS101s11) deletion polypeptides are encompassed by the present invention: M1-F1545, L2-F1545, E3-F1545, K4-F1545, F5-F1545, C6-F1545, N7-F1545, S8-F1545, T9-F1545, F10-F1545, W11-F1545, N12-F1545, S13-F1545, S14-F1545, F15-F1545, L16-F1545, D17-F1545, S18-F1545, P19-F1545, E20-F1545, A21-F1545, D22-F1545, L23-F1545, P24-F1545, L25-F1545, C26-F1545, F27-F1545, E28-F1545, Q29-F1545, T30-F1545, V31-F1545, L32-F1545, V33-F1545, W34-F1545, I35-F1545, P36-F1545, L37-F1545, G38-F1545, F39-F1545, L40-F1545, W41-F1545, LA2-F1545, L43-F1545, A44-F1545, P45-F1545, W46-F1545, Q47-F1545, L48-F1545, LA9-F1545, H50-F1545, V51-F1545, Y52-F1545, K53-F1545, S54-F1545, R55-F1545, T56-F1545, K57-F1545, R58-F1545, S59-F1545, S60-F1545, T61-F1545, T62-F1545, K63-F1545, L64-F1545, Y65-F1545, L66-F1545, A67-F1545, K68-F1545, Q69-F1545, V70-F1545, F71-F1545, V72-F1545, G73-F1545, F74-F1545, L75-F1545, L76-F1545, I77-F1545, L78-F1545, A79-F1545, A80-F1545, I81-F1545, E82-F1545, L83-F1545, A84-F1545, L85-F1545, V86-F1545, L87-F1545, T88-F1545, E89-F1545, D90-F1545, S91-F1545, G92-F1545, Q93-F1545, A94-F1545, T95-F1545, V96-F1545, P97-F1545, A98-F1545, V99-F1545, R100-F1545, Y101-F1545, T102-F1545, N103-F1545, P104-F1545, S105-F1545, L106-F1545, Y107-F1545, L108-F1545, G109-F1545, T110-F1545, W111-F1545, L112-F1545, L113-F1545, V114-F1545, L115-F1545, L116-F1545, I117-F1545, Q118-F1545, Y119-F1545, S120-F1545, R121-F1545, Q122-F1545, W123-F1545, C124-F1545, V125-F1545, Q126-F1545, K127-F1545, N128-F1545, S129-F1545, W130-F1545, F131-F1545, L132-F1545, S133-F1545, L134-F1545, F135-F1545, W136-F1545, I137-F1545, L138-F1545, S139-F1545, I140-F1545, L141-F1545, C142-F1545, G143-F1545, T144-F1545, F145-F1545, Q146-F1545, F147-F1545, Q148-F1545, T149-F1545, L150-F1545, I151-F1545, R152-F1545, T153-F1545, L154-F1545, L155-F1545, Q156-F1545, G157-F1545, D158-F1545, N159-F1545, S160-F1545, N161-F1545, L162-F1545, A163-F1545, Y164-F1545, S165-F1545, C166-F1545, L167-F1545, F168-F1545, F169-F1545, I170-F1545, S171-F1545, Y172-F1545, G173-F1545, F174-F1545, Q175-F1545, I176-F1545, L177-F1545, I178-F1545, L179-F1545, I180-F1545, F181-F1545, S182-F1545, A183-F1545, F184-F1545, S185-F1545, E186-F1545, N187-F1545, N188-F1545, E189-F1545, S190-F1545, S191-F1545, N192-F1545, N193-F1545, P194-F1545, S195-F1545, S196-F1545, I197-F1545, A198-F1545, S199-F1545, F200-F1545, L201-F1545, S202-F1545, S203-F1545, I204-F1545, T205-F1545, Y206-F1545, S207-F1545, W208-F1545, Y209-F1545, D210-F1545, S211-F1545, I212-F1545, I213-F1545, L214-F1545, K215-F1545, G216-F1545, Y217-F1545, K218-F1545, R219-F1545, P220-F1545, L221-F1545, T222-F1545, L223-F1545, E224-F1545, D225-F1545, V226-F1545, W227-F1545, E228-F1545, V229-F1545, D230-F1545, E231-F1545, E232-F1545, M233-F1545, K234-F1545, T235-F1545, K236-F1545, T237-F1545, L238-F1545, V239-F1545, S240-F1545, K241-F1545, F242-F1545, E243-F1545, T244-F1545, H245-F1545, M246-F1545, K247-F1545, R248-F1545, E249-F1545, L250-F1545, Q251-F1545, K252-F1545, A253-F1545, R254-F1545, R255-F1545, A256-F1545, L257-F1545, Q258-F1545, R259-F1545, R260-F1545, Q261-F1545, E262-F1545, K263-F1545, S264-F1545, S265-F1545, Q266-F1545, Q267-F1545, N268-F1545, S269-F1545, G270-F1545, A271-F1545, R272-F1545, L273-F1545, P274-F1545, G275-F1545, L276-F1545, N277-F1545, K278-F1545, N279-F1545, Q280-F1545, S281-F1545, Q282-F1545, S283-F1545, Q284-F1545, D285-F1545, A286-F1545, L287-F1545, V288-F1545, L289-F1545, E290-F1545, D291-F1545, V292-F1545, E293-F1545, K294-F1545, K295-F1545, K296-F1545, K297-F1545, K298-F1545, S299-F1545, G300-F1545, T301-F1545, K302-F1545, K303-F1545, D304-F1545, V305-F1545, P306-F1545, K307-F1545, S308-F1545, W309-F1545, L310-F1545, M311-F1545, K312-F1545, A313-F1545, L314-F1545, F315-F1545, K316-F1545, T317-F1545, F318-F1545, Y319-F1545, M320-F1545, V321-F1545, L322-F1545, L323-F1545, K324-F1545, S325-F1545, F326-F1545, L327-F1545, L328-F1545, K329-F1545, L330-F1545, V331-F1545, N332-F1545, D333-F1545, I334-F1545, F335-F1545, T336-F1545, F337-F1545, V338-F1545, S339-F1545, P340-F1545, Q341-F1545, L342-F1545, L343-F1545, K344-F1545, L345-F1545, L346-F1545, I347-F1545, S348-F1545, F349-F1545, A350-F1545, S351-F1545, D352-F1545, R353-F1545, D354-F1545, T355-F1545, Y356-F1545, L357-F1545, W358-F1545, I359-F1545, G360-F1545, Y361-F1545, L362-F1545, C363-F1545, A364-F1545, I365-F1545, L366-F1545, L367-F1545, F368-F1545, T369-F1545, A370-F1545, A371-F1545, L372-F1545, I373-F1545, Q374-F1545, S375-F1545, F376-F1545, C377-F1545, L378-F1545, Q379-F1545, C380-F1545, Y381-F1545, F382-F1545, Q383-F1545, L384-F1545, C385-F1545, F386-F1545, K387-F1545, L388-F1545, G389-F1545, V390-F1545, K391-F1545, V392-F1545, R393-F1545, T394-F1545, A395-F1545, I396-F1545, M397-F1545, A398-F1545, S399-F1545, V400-F1545, Y401-F1545, K402-F1545, K403-F1545, A404-F1545, L405-F1545, T406-F1545, L407-F1545, S408-F1545, N409-F1545, L410-F1545, A411-F1545, R412-F1545, K413-F1545, E414-F1545, Y415-F1545, T416-F1545, V417-F1545, G418-F1545, E419-F1545, T420-F1545, V421-F1545, N422-F1545, L423-F1545, M424-F1545, S425-F1545, V426-F1545, D427-F1545, A428-F1545, Q429-F1545, K430-F1545, L431-F1545, M432-F1545, D433-F1545, V434-F1545, T435-F1545, N436-F1545, F437-F1545, M438-F1545, H439-F1545, M440-F1545, L441-F1545, W442-F1545, S443-F1545, S444-F1545, V445-F1545, L446-F1545, Q447-F1545, I448-F1545, V449-F1545, L450-F1545, S451-F1545, I452-F1545, F453-F1545, F454-F1545, L455-F1545, W456-F1545, R457-F1545, E458-F1545, L459-F1545, G460-F1545, P461-F1545, S462-F1545, V463-F1545, L464-F1545, A465-F1545, G466-F1545, V467-F1545, G468-F1545, V469-F1545, M470-F1545, V471-F1545, L472-F1545, V473-F1545, I474-F1545, P475-F1545, I476-F1545, N477-F1545, A478-F1545, I479-F1545, L480-F1545, S481-F1545, T482-F1545, K483-F1545, S484-F1545, K485-F1545, T486-F1545, I487-F1545, Q488-F1545, V489-F1545, K490-F1545, N491-F1545, M492-F1545, K493-F1545, N494-F1545, K495-F1545, D496-F1545, K497-F1545, R498-F1545, L499-F1545, K500-F1545, I501-F1545, M502-F1545, N503-F1545, E504-F1545, I505-F1545, L506-F1545, S507-F1545, G508-F1545, I509-F1545, K510-F1545, I511-F1545, L512-F1545, K513-F1545, Y514-F1545, F515-F1545, A516-F1545, W517-F1545, E518-F1545, P519-F1545, S520-F1545, F521-F1545, R522-F1545, D523-F1545, Q524-F1545, V525-F1545, Q526-F1545, N527-F1545, L528-F1545, R529-F1545, K530-F1545, K531-F1545, E532-F1545, L533-F1545, K534-F1545, N535-F1545, L536-F1545, L537-F1545, A538-F1545, F539-F1545, S540-F1545, Q541-F1545, L542-F1545, Q543-F1545, C544-F1545, V545-F1545, V546-F1545, I547-F1545, F548-F1545, V549-F1545, F550-F1545, Q551-F1545, L552-F1545, T553-F1545, P554-F1545, V555-F1545, L556-F1545, V557-F1545, S558-F1545, V559-F1545, V560-F1545, T561-F1545, F562-F1545, S563-F1545, V564-F1545, Y565-F1545, V566-F1545, L567-F1545, V568-F1545, D569-F1545, S570-F1545, N571-F1545, N572-F1545, I573-F1545, L574-F1545, D575-F1545, A576-F1545, Q577-F1545, K578-F1545, A579-F1545, F580-F1545, T581-F1545, S582-F1545, I583-F1545, T584-F1545, L585-F1545, F586-F1545, N587-F1545, I588-F1545, L589-F1545, R590-F1545, F591-F1545, P592-F1545, L593-F1545, S594-F1545, M595-F1545, L596-F1545, P597-F1545, M598-F1545, M599-F1545, I600-F1545, S601-F1545, S602-F1545, M603-F1545, L604-F1545, Q605-F1545, A606-F1545, S607-F1545, V608-F1545, S609-F1545, T610-F1545, E611-F1545, R612-F1545, L613-F1545, E614-F1545, K615-F1545, Y616-F1545, L617-F1545, G618-F1545, G619-F1545, D620-F1545, D621-F1545, L622-F1545, D623-F1545, T624-F1545, S625-F1545, A626-F1545, I627-F1545, R628-F1545, H629-F1545, D630-F1545, C631-F1545, N632-F1545, F633-F1545, D634-F1545, K635-F1545, A636-F1545, M637-F1545, Q638-F1545, F639-F1545, S640-F1545, E641-F1545, A642-F1545, S643-F1545, F644-F1545, T645-F1545, W646-F1545, E647-F1545, H648-F1545, D649-F1545, S650-F1545, E651-F1545, A652-F1545, T653-F1545, V654-F1545, R655-F1545, D656-F1545, V657-F1545, N658-F1545, L659-F1545, D660-F1545, I661-F1545, M662-F1545, A663-F1545, G664-F1545, Q665-F1545, L666-F1545, V667-F1545, A668-F1545, V669-F1545, I670-F1545, G671-F1545, P672-F1545, V673-F1545, G674-F1545, S675-F1545, G676-F1545, K677-F1545, S678-F1545, S679-F1545, L680-F1545, I681-F1545, S682-F1545, A683-F1545, M684-F1545, L685-F1545, G686-F1545, E687-F1545, M688-F1545, E689-F1545, N690-F1545, V691-F1545, H692-F1545, G693-F1545, H694-F1545, I695-F1545, T696-F1545, I697-F1545, K698-F1545, G699-F1545, T700-F1545, T701-F1545, A702-F1545, Y703-F1545, V704-F1545, P705-F1545, Q706-F1545, Q707-F1545, S708-F1545, W709-F1545, I710-F1545, Q711-F1545, N712-F1545, G713-F1545, T714-F1545, I715-F1545, K716-F1545, D717-F1545, N718-F1545, I719-F1545, L720-F1545, F721-F1545, G722-F1545, T723-F1545, E724-F1545, F725-F1545, N726-F1545, E727-F1545, K728-F1545, R729-F1545, Y730-F1545, Q731-F1545, Q732-F1545, V733-F1545, L734-F1545, E735-F1545, A736-F1545, C737-F1545, A738-F1545, L739-F1545, L740-F1545, P741-F1545, D742-F1545, L743-F1545, E744-F1545, M745-F1545, L746-F1545, P747-F1545, G748-F1545, G749-F1545, D750-F1545, L751-F1545, A752-F1545, E753-F1545, I754-F1545, G755-F1545, E756-F1545, K757-F1545, G758-F1545, I759-F1545, N760-F1545, L761-F1545, S762-F1545, G763-F1545, G764-F1545, Q765-F1545, K766-F1545, Q767-F1545, R768-F1545, I769-F1545, S770-F1545, L771-F1545, A772-F1545, R773-F1545, A774-F1545, T775-F1545, Y776-F1545, Q777-F1545, N778-F1545, L779-F1545, D780-F1545, I781-F1545, Y782-F1545, L783-F1545, L784-F1545, D785-F1545, D786-F1545, P787-F1545, L788-F1545, S789-F1545, A790-F1545, V791-F1545, D792-F1545, A793-F1545, H794-F1545, V795-F1545, G796-F1545, K797-F1545, H798-F1545, I799-F1545, F800-F1545, N801-F1545, K802-F1545, V803-F1545, L804-F1545, G805-F1545, P806-F1545, N807-F1545, G808-F1545, L809-F1545, L810-F1545, K811-F1545, G812-F1545, K813-F1545, T814-F1545, R815-F1545, L816-F1545, L817-F1545, V818-F1545, T819-F1545, H820-F1545, S821-F1545, M822-F1545, H823-F1545, F824-F1545, L825-F1545, P826-F1545, Q827-F1545, V828-F1545, D829-F1545, E830-F1545, I831-F1545, V832-F1545, V833-F1545, L834-F1545, G835-F1545, N836-F1545, G837-F1545, T838-F1545, I839-F1545, V840-F1545, E841-F1545, K842-F1545, G843-F1545, S844-F1545, Y845-F1545, S846-F1545, A847-F1545, L848-F1545, L849-F1545, A850-F1545, K851-F1545, K852-F1545, G853-F1545, E854-F1545, F855-F1545, A856-F1545, K857-F1545, N858-F1545, L859-F1545, K860-F1545, T861-F1545, F862-F1545, L863-F1545, R864-F1545, H865-F1545, T866-F1545, G867-F1545, P868-F1545, E869-F1545, E870-F1545, E871-F1545, A872-F1545, T873-F1545, V874-F1545, H875-F1545, D876-F1545, G877-F1545, S878-F1545, E879-F1545, E880-F1545, E881-F1545, D882-F1545, D883-F1545, D884-F1545, Y885-F1545, G886-F1545, L887-F1545, I888-F1545, S889-F1545, S890-F1545, V891-F1545, E892-F1545, E893-F1545, I894-F1545, P895-F1545, E896-F1545, D897-F1545, A898-F1545, A899-F1545, S900-F1545, I901-F1545, T902-F1545, M903-F1545, R904-F1545, R905-F1545, E906-F1545, N907-F1545, S908-F1545, F909-F1545, R910-F1545, R911-F1545, T912-F1545, L913-F1545, S914-F1545, R915-F1545, S916-F1545, S917-F1545, R918-F1545, S919-F1545, N920-F1545, G921-F1545, R922-F1545, H923-F1545, L924-F1545, K925-F1545, S926-F1545, L927-F1545, R928-F1545, N929-F1545, S930-F1545, L931-F1545, K932-F1545, T933-F1545, R934-F1545, N935-F1545, V936-F1545, N937-F1545, S938-F1545, L939-F1545, K940-F1545, E941-F1545, D942-F1545, E943-F1545, E944-F1545, L945-F1545, V946-F1545, K947-F1545, G948-F1545, Q949-F1545, K950-F1545, L951-F1545, I952-F1545, K953-F1545, K954-F1545, E955-F1545, F956-F1545, I957-F1545, E958-F1545, T959-F1545, G960-F1545, and/or R961-F1545 of SEQ ID NO:38. Polynucleotide sequences encoding these polypeptides are also provided. The present invention also encompasses the use of these N-terminal cMOAT (SNP_ID:PS 101s11) deletion polypeptides as immunogenic and/or antigenic epitopes as described elsewhere herein.

[0262] In preferred embodiments, the following C-terminal cMOAT (SNP_ID:PS110s11) deletion polypeptides are encompassed by the present invention: M1-F1545, M1-K1544, M1-T1543, M1-S1542, M1-N1541, M1-V1540, M1-N1539, M1-E1538, M1-I1537, M1-G1536, M1-A1535, M1-E1534, M1-K1533, M1-A1532, M1-M1531, M1-F1530, M1-Y1529, M1-F1528, M1-P1527, M1-G1526, M1-P1525, M1-I1524, M1-Q1523, M1-L1522, M1-L1521, M1-E1520, M1-E1519, M1-P1518, M1-S1517, M1-G1516, M1-Y1515, M1-E1514, M1-I1513, M1-I1512, M1-K1511, M1-G1510, M1-N1509, M1-D1508, M1-L1507, M1-V1506, M1-M1505, M1-V1504, M1-K1503, M1-D1502, M1-S1501, M1-D1500, M1-M1499, M1-I1498, M1-T1497, M1-H1496, M1-L1495, M1-R1494, M1-H1493, M1-A1492, M1-I1491, M1-T1490, M1-I1489, M1-V1488, M1-T1487, M1-C1486, M1-H1485, M1-A1484, M1-F1483, M1-E1482, M1-N1481, M1-Q1480, M1-I1479, M1-T1478, M1-T1477, M1-Q1476, M1-I1475, M1-L1474, M1-N1473, M1-D1472, M1-T1471, M1-E1470, M1-L1469, M1-D1468, M1-V1467, M1-A1466, M1-A1465, M1-T1464, M1-A1463, M1-E1462, M1-D1461, M1-L1460, M1-V1459, M1-L1458, M1-I1457, M1-K1456, M1-S1455, M1-K1454, M1-R1453, M1-L1452, M1-L1451, M1-A1450, M1-R1449, M1-G1448, M1-L1447, M1-C1446, M1-L1445, M1-L1444, M1-Q1443, M1-R1442, M1-Q1441, M1-G1440, M1-I1439, M1-S1438, M1-L1437, M1-N1436, M1-G1435, M1-G1434, M1-A1433, M1-E1432, M1-T1431, M1-V1430, M1-E1429, M1-H1428, M1-S1427, M1-L1426, M1-G1425, M1-L1424, M1-Q1423, M1-L1422, M1-S1421, M1-A1420, M1-V1419, M1-F1418, M1-S1417, M1-K1416, M1-L1415, M1-H1414, M1-A1413, M1-L1412, M1-E1411, M1-L1410, M1-A1409, M1-K1408, M1-W1407, M1-I1406, M1-E1405, M1-E1404, M1-D1403, M1-S1402, M1-Y1401, M1-N1400, M1-N1399, M1-F1398, M1-P1397, M1-D1396, M1-L1395, M1-N1394, M1-M1393, M1-R1392, M1-L1391, M1-S1390, M1-G1389, M1-S1388, M1-F1387, M1-L1386, M1-I1385, M1-P1384, M1-D1383, M1-Q1382, M1-P1381, M1-I1380, M1-I1379, M1-T1378, M1-L1377, M1-K1376, M1-E1375, M1-R1374, M1-L1373, M1-D1372, M1-H1371, M1-L1370, M1-G1369, M1-I1368, M1-S1367, M1-A1366, M1-I1365, M1-D1364, M1-V1363, M1-G1362, M1-D1361, M1-I1360, M1-I1359, M1-I1358, M1-Q1357, M1-G1356, M1-G1355, M1-A1354, M1-A1353, M1-E1352, M1-L1351, M1-I1350, M1-R1349, M1-F1348, M1-L1347, M1-C1346, M1-N1345, M1-T1344, M1-L1343, M1-S1342, M1-S1341, M1-K1340, M1-G1339, M1-A1338, M1-G1337, M1-T1336, M1-R1335, M1-G1334, M1-V1333, M1-V1332, M1-G1331, M1-I1330, M1-K1329, M1-E1328, M1-M1327, M1-S1326, M1-G1325, M1-I1324, M1-D1323, M1-C1322, M1-T1321, M1-I1320, M1-G1319, M1-R1318, M1-L1317, M1-V1316, M1-L1315, M1-D1314, M1-L1313, M1-E1312, M1-P1311, M1-R1310, M1-Y1309, M1-R1308, M1-V1307, M1-Q1306, M1-Y1305, M1-N1304, M1-N1303, M1-F1302, M1-Q1301, M1-I1300, M1-K1299, M1-G1298, M1-K1297, M1-S1296, M1-P1295, M1-W1294, M1-D1293, M1-P1292, M1-P1291, M1-P1290, M1-R1289, M1-K1288, M1-D1287, M1-T1286, M1-V1285, M1-W1284, M1-P1283, M1-A1282, M1-E1281, M1-N1280, M1-E1279, M1-V1278, M1-K1277, M1-T1276, M1-Y1275, M1-E1274, M1-T1273, M1-I1272, M1-R1271, M1-E1270, M1-V1269, M1-A1268, M1-V1267, M1-I1266, M1-N1265, M1-T1264, M1-E1263, M1-I1262, M1-E1261, M1-S1260, M1-T1259, M1-M1258, M1-R1257, M1-V1256, M1-L1255, M1-W1254, M1-N1253, M1-L1252, M1-T1251, M1-Q1250, M1-T1249, M1-I1248, M1-N1247, M1-L1246, M1-A1245, M1-N1244, M1-S1243, M1-L1242, M1-V1241, M1-F1240, M1-G1239, M1-V1238, M1-T1237, M1-D1236, M1-G1235, M1-S1234, M1-L1233, M1-T1232, M1-D1231, M1-R1230, M1-Y1229, M1-I1228, M1-V1227, M1-M1226, M1-M1225, M1-L1224, M1-A1223, M1-S1222, M1-F1221, M1-F1220, M1-V1219, M1-T1218, M1-L1217, M1-N1216, M1-G1215, M1-V1214, M1-L1213, M1-E1212, M1-L1211, M1-R1210, M1-I1209, M1-A1208, M1-L1207, M1-W1206, M1-R1205, M1-N1204, M1-S1203, M1-T1202, M1-I1201, M1-W1200, M1-S1199, M1-F1198, M1-V1197, M1-C1196, M1-K1195, M1-Q1194, M1-N1193, M1-T1192, M1-D1191, M1-I1190, M1-R1189, M1-E1188, M1-E1187, M1-N1186, M1-H1185, M1-K1184, M1-L1183, M1-F1182, M1-R1181, M1-Q1180, M1-Q1179, M1-H1178, M1-E1177, M1-F1176, M1-A1175, M1-R1174, M1-I1173, M1-V1172, M1-P1171, M1-L1170, M1-G1169, M1-S1168, M1-V1167, M1-T1166, M1-E1165, M1-S1164, M1-F1163, M1-H1162, M1-S1161, M1-Y1160, M1-I1159, M1-P1158, M1-S1157, M1-R1156, M1-T1155, M1-V1154, M1-S1153, M1-D1152, M1-L1151, M1-R1150, M1-R1149, M1-L1148, M1-Q1147, M1-R1146, M1-S1145, M1-T1144, M1-S1143, M1-V1142, M1-Y1141, M1-F1140, M1-M1139, M1-Q1138, M1-V1137, M1-S1136, M1-V1135, M1-Y1134, M1-I1133, M1-I1132, M1-G1131, M1-L1130, M1-P1129, M1-I1128, M1-V1127, M1-I1126, M1-I1125, M1-T1124, M1-F1123, M1-V1122, M1-P1121, M1-T1120, M1-A1119, M1-M1118, M1-C1117, M1-I1116, M1-M1115, M1-V1114, M1-L1113, M1-T1112, M1-S1111, M1-I1110, M1-I1109, M1-G1108, M1-L1107, M1-F1106, M1-C1105, M1-T1104, M1-I1103, M1-W1102, M1-S1101, M1-R1100, M1-L1099, M1-S1098, M1-Q1097, M1-P1096, M1-L1095, M1-T1094, M1-D1093, M1-D1092, M1-V1091, M1-T1090, M1-S1089, M1-I1088, M1-D1087, M1-G1086, M1-A1085, M1-F1084, M1-R1083, M1-N1082, M1-V1081, M1-I1080, M1-R1079, M1-G1078, M1-T1077, M1-P1076, M1-T1075, M1-T1074, M1-D1073, M1-F1072, M1-F1071, M1-R1070, M1-M1069, M1-P1068, M1-A1067, M1-R1066, M1-L1065, M1-I1064, M1-N1063, M1-N1062, M1-L1061, M1-L1060, M1-Q1059, M1-K1058, M1-H1057, M1-L1056, M1-I1055, M1-N1054, M1-S1053, M1-A1052, M1-H1051, M1-V1050, M1-F1049, M1-G1048, M1-F1047, M1-A1046, M1-S1045, M1-W1044, M1-F1043, M1-H1042, M1-A1041, M1-I1040, M1-F1039, M1-V1038, M1-F1037, M1-I1036, M1-G1035, M1-Q1034, M1-A1033, M1-L1032, M1-G1031, M1-L1030, M1-A1029, M1-G1028, M1-Y1027, M1-V1026, M1-G1025, M1-V1024, M1-R1023, M1-M1022, M1-D1021, M1-R1020, M1-Q1019, M1-S1018, M1-A1017, M1-P1016, M1-Y1015, M1-D1014, M1-T1013, M1-S1012, M1-N1011, M1-F1010, M1-I1009, M1-K1008, M1-S1007, M1-D1006, M1-S1005, M1-T1004, M1-W1003, M1-A1002, M1-S1001, M1-L1000, M1-W999, M1-L998, M1-N997, M1-S996, M1-G995, M1-I994, M1-F993, M1-A992, M1-V991, M1-S990, M1-N989, M1-M988, M1-V987, M1-F986, M1-A985, M1-L984, M1-I983, M1-I982, M1-F981, M1-F980, M1-I979, M1-S978, M1-F977, M1-L976, M1-G975, M1-I974, M1-A973, M1-Q972, M1-L971, M1-Y970, M1-E969, M1-L968, M1-Y967, M1-I966, M1-S965, M1-F964, M1-K963, M1-V962, and/or M1-R961 of SEQ ID NO:38. Polynucleotide sequences encoding these polypeptides are also provided. The present invention also encompasses the use of these C-terminal cMOAT (SNP_ID:PS101s1) deletion polypeptides as immunogenic and/or antigenic epitopes as described elsewhere herein.

[0263] Alternatively, preferred polypeptides of the present invention may comprise polypeptide sequences corresponding to, for example, internal regions of the cMOAT (SNP_ID: PS101s11) polypeptide (e.g., any combination of both N- and C-terminal cMOAT (SNP_ID: PS101s11) polypeptide deletions) of SEQ ID NO:38. For example, internal regions could be defined by the equation: amino acid NX to amino acid CX, wherein NX refers to any N-terminal deletion polypeptide amino acid of cMOAT (SNP_ID: PS101s11) (SEQ ID NO:38), and where CX refers to any C-terminal deletion polypeptide amino acid of cMOAT (SNP_ID: PS101s11) (SEQ ID NO:38). Polynucleotides encoding these polypeptides are also provided. The present invention also encompasses the use of these polypeptides as an immunogenic and/or antigenic epitope as described elsewhere herein. Preferably, the resulting deletion polypeptide comprises the polypeptide polymorphic loci identified elsewhere herein for cMOAT (SNP_ID: PS101s11), and more preferably comprises the polypeptide polymorphic allele identified elsewhere herein for cMOAT (SNP_ID: PS 101s11).

### Features of the Polypeptide Encoded by Gene No: 18

[0264] The present invention relates to isolated nucleic acid molecules comprising, or alternatively, consisting of all or a portion of the variant allele of the human cMOAT, ATP-binding cassette sub-family C member 2 gene (SNP_ID: PS101s130) (e.g., wherein reference or wildtype cMOAT gene is exemplified by SEQ ID NO:1). Preferred portions are at least 10, preferably at least 20, preferably at least 40, preferably at least 100, contiguous polynucleotides and comprise a “G” at the nucleotide position corresponding to nucleotide 359 of the cMOAT gene, or a portion of SEQ ID NO:39. Alternatively, preferred portions are at least 10, preferably at least 20, preferably at least 40, preferably at least 100, contiguous polynucleotides and comprise an “A” at the nucleotide position corresponding to nucleotide 359 of the cMOAT gene, or a portion of SEQ ID NO:39. The invention further relates to isolated gene products, e.g., polypeptides and/or proteins, which are encoded by a nucleic acid molecule comprising all or a portion of the variant allele of the cMOAT gene.

[0265] In one embodiment, the invention relates to a method for predicting the likelihood that an individual will have a disorder associated with a “G” at the nucleotide position corresponding to nucleotide position 359 of SEQ ID NO:39 (or diagnosing or aiding in the diagnosis of such a disorder) comprising the steps of obtaining a DNA sample from an individual to be assessed and determining the nucleotide present at position 359 of SEQ ID NO:39. The presence of a “G” at this position indicates that the individual has a greater likelihood of having a disorder associated therewith than an individual having an “A” at that position, or a greater likelihood of having more severe symptoms.

[0266] Conversely, the invention relates to a method for predicting the likelihood that an individual will have a disorder associated with an “A” at the nucleotide position corresponding to nucleotide position 359 of SEQ ID NO:39 (or diagnosing or aiding in the diagnosis of such a disorder) comprising the steps of obtaining a DNA sample from an individual to be assessed and determining the nucleotide present at position 359 of SEQ ID NO:39. The presence of an “A” at this position indicates that the individual has a greater likelihood of having a disorder associated therewith than an individual having a “G” at that position, or a greater likelihood of having more severe symptoms.

[0267] Representative disorders which may be detected, diagnosed, identified, treated, prevented, and/or ameliorated by the present invention include, the following, non-limiting diseases and disorders: decreased heptic uptake of administered statins, resistance to beneficial responses of administered statins; resistance to LDL lowering responses to administered statins; resistance to TG lowering responses to administered statins; resistance to HDL elevating responses to administered statins; increased incidence of drug interactions between one or more administered statins; increased incidence of drug and endogenous substance interactions between a statin drug and endogenous substrates of cMOAT including cholate, taurocholate, thyroid hormones T3 and T4, DHEAS, estradiol-17beta-glucuronide, estrone-3-sulfate, prostaglandin E2, thromboxane B2, leukotriene C4, leukotriene E4, and bilirubin and its conjugates; decreased response to HMG-CoA reductase inhibitors; in addition to other disorders referenced herein, which include, for example, any disorder related to high levels of circulating LDL, high levels of TG, and/or low levels of circularing HDL, which include, but are not limited to, cardiovascular diseases, hepatic diseases, angina pectoris, hypertension, heart failure, myocardial infarction, ventricular hypertrophy, vascular diseases, miscrovascular disease, vascular leak syndrome, aneurysm, stroke, embolism, thrombosis, endothelial dysfunction, coronary artery disease, arteriosclerosis, and/or atherosclerosis.

### Features of the Polypeptide Encoded by Gene No:19

[0268] The present invention relates to isolated nucleic acid molecules comprising, or alternatively, consisting of all or a portion of the variant allele of the human cMOAT, ATP-binding cassette sub-family C member 2 gene (SNP_ID: PS101s220) (e.g., wherein reference or wildtype cMOAT gene is exemplified by SEQ ID NO:1). Preferred portions are at least 10, preferably at least 20, preferably at least 40, preferably at least 100, contiguous polynucleotides and comprise a “C” at the nucleotide position corresponding to nucleotide 2110 of the cMOAT gene, or a portion of SEQ ID NO:41. Alternatively, preferred portions are at least 10, preferably at least 20, preferably at least 40, preferably at least 100, contiguous polynucleotides and comprise a “T” at the nucleotide position corresponding to nucleotide 2110 of the cMOAT gene, or a portion of SEQ ID NO:41. The invention further relates to isolated gene products, e.g., polypeptides and/or proteins, which are encoded by a nucleic acid molecule comprising all or a portion of the variant allele of the cMOAT gene.

[0269] In one embodiment, the invention relates to a method for predicting the likelihood that an individual will have a disorder associated with a “C” at the nucleotide position corresponding to nucleotide position 2110 of SEQ ID NO:41 (or diagnosing or aiding in the diagnosis of such a disorder) comprising the steps of obtaining a DNA sample from an individual to be assessed and determining the nucleotide present at position 2110 of SEQ ID NO:41. The presence of a “C” at this position indicates that the individual has a greater likelihood of having a disorder associated therewith than an individual having a “T” at that position, or a greater likelihood of having more severe symptoms.

[0270] Conversely, the invention relates to a method for predicting the likelihood that an individual will have a disorder associated with a “T” at the nucleotide position corresponding to nucleotide position 2110 of SEQ ID NO:41 (or diagnosing or aiding in the diagnosis of such a disorder) comprising the steps of obtaining a DNA sample from an individual to be assessed and determining the nucleotide present at position 2110 of SEQ ID NO:41. The presence of a “T” at this position indicates that the individual has a greater likelihood of having a disorder associated therewith than an individual having a “C” at that position, or a greater likelihood of having more severe symptoms.

[0271] The present invention further relates to isolated proteins or polypeptides comprising, or alternatively, consisting of all or a portion of the encoded variant amino acid sequence of the human human cMOAT, solute carrier family 21 member 6 polypeptide (e.g., wherein reference or wildtype human cMOAT, solute carrier family 21 member 6 polypeptide is exemplified by SEQ ID NO:2). Preferred portions are at least 10, preferably at least 20, preferably at least 40, preferably at least 100, contiguous polypeptides and comprises a “T” at the amino acid position corresponding to amino acid 670 of the cMOAT polypeptide, or a portion of SEQ ID NO:42. Alternatively, preferred portions are at least 10, preferably at least 20, preferably at least 40, preferably at least 100, contiguous polypeptides and comprises a “I” at the amino acid position corresponding to amino acid 670 of the cMOAT protein, or a portion of SEQ ID NO:42. The invention further relates to isolated nucleic acid molecules encoding such polypeptides or proteins, as well as to antibodies that bind to such proteins or polypeptides.

[0272] Representative disorders which may be detected, diagnosed, identified, treated, prevented, and/or ameliorated by the present invention include, the following, non-limiting diseases and disorders: decreased heptic uptake of administered statins, resistance to beneficial responses of administered statins; resistance to LDL lowering responses to administered statins; resistance to TG lowering responses to administered statins; resistance to HDL elevating responses to administered statins; increased incidence of drug interactions between one or more administered statins; increased incidence of drug and endogenous substance interactions between a statin drug and endogenous substrates of cMOAT including cholate, taurocholate, thyroid hormones T3 and T4, DHEAS, estradiol-17beta-glucuronide, estrone-3-sulfate, prostaglandin E2, thromboxane B2, leukotriene C4, leukotriene E4, and bilirubin and its conjugates; decreased response to HMG-CoA reductase inhibitors; in addition to other disorders referenced herein, which include, for example, any disorder related to high levels of circulating LDL, high levels of TG, and/or low levels of circularing HDL, which include, but are not limited to, cardiovascular diseases, hepatic diseases, angina pectoris, hypertension, heart failure, myocardial infarction, ventricular hypertrophy, vascular diseases, miscrovascular disease, vascular leak syndrome, aneurysm, stroke, embolism, thrombosis, endothelial dysfunction, coronary artery disease, arteriosclerosis, and/or atherosclerosis.

[0273] In preferred embodiments, the following N-terminal cMOAT (SNP_ID:PS101s22) deletion polypeptides are encompassed by the present invention: M1-F1545, L2-F1545, E3-F1545, K4-F1545, F5-F1545, C6-F1545, N7-F1545, S8-F1545, T9-F1545, F10-F1545, W11-F1545, N12-F1545, S13-F1545, S14-F1545, F15-F1545, L16-F1545, D17-F1545, S18-F1545, P19-F1545, E20-F1545, A21-F1545, D22-F1545, L23-F1545, P24-F1545, L25-F1545, C26-F1545, F27-F1545, E28-F1545, Q29-F1545, T30-F1545, V31-F1545, L32-F1545, V33-F1545, W34-F1545, I35-F1545, P36-F1545, L37-F1545, G38-F1545, F39-F1545, L40-F1545, W41-F1545, LA2-F1545, L43-F1545, A44-F1545, P45-F1545, W46-F1545, Q47-F1545, L48-F1545, L49-F1545, H50-F1545, V51-F1545, Y52-F1545, K53-F1545, S54-F1545, R55-F1545, T56-F1545, K57-F1545, R58-F1545, S59-F1545, S60-F1545, T61-F1545, T62-F1545, K63-F1545, L64-F1545, Y65-F1545, L66-F1545, A67-F1545, K68-F1545, Q69-F1545, V70-F1545, F71-F1545, V72-F1545, G73-F1545, F74-F1545, L75-F1545, L76-F1545, I77-F1545, L78-F1545, A79-F1545, A80-F1545, I81-F1545, E82-F1545, L83-F1545, A84-F1545, L85-F1545, V86-F1545, L87-F1545, T88-F1545, E89-F1545, D90-F1545, S91-F1545, G92-F1545, Q93-F1545, A94-F1545, T95-F1545, V96-F1545, P97-F1545, A98-F1545, V99-F1545, R100-F1545, Y101-F1545, T102-F1545, N103-F1545, P104-F1545, S105-F1545, L106-F1545, Y107-F1545, L108-F1545, G109-F1545, T110-F1545, W111-F1545, L112-F1545, L113-F1545, V114-F1545, L115-F1545, L116-F1545, I117-F1545, Q118-F1545, Y119-F1545, S120-F1545, R121-F1545, Q122-F1545, W123-F1545, C124-F1545, V125-F1545, Q126-F1545, K127-F1545, N128-F1545, S129-F1545, W130-F1545, F131-F1545, L132-F1545, S133-F1545, L134-F1545, F135-F1545, W136-F1545, I137-F1545, L138-F1545, S139-F1545, I140-F1545, L141-F1545, C142-F1545, G143-F1545, T144-F1545, F145-F1545, Q146-F1545, F147-F1545, Q148-F1545, T149-F1545, L150-F1545, I151-F1545, R152-F1545, T153-F1545, L154-F1545, L155-F1545, Q156-F1545, G157-F1545, D158-F1545, N159-F1545, S160-F1545, N161-F1545, L162-F1545, A163-F1545, Y164-F1545, S165-F1545, C166-F1545, L167-F1545, F168-F1545, F169-F1545, I170-F1545, S171-F1545, Y172-F1545, G173-F1545, F174-F1545, Q175-F1545, I176-F1545, L177-F1545, I178-F1545, L179-F1545, I180-F1545, F181-F1545, S182-F1545, A183-F1545, F184-F1545, S185-F1545, E186-F1545, N187-F1545, N188-F1545, E189-F1545, S190-F1545, S191-F1545, N192-F1545, N193-F1545, P194-F1545, S195-F1545, S196-F1545, I197-F1545, A198-F1545, S199-F1545, F200-F1545, L201-F1545, S202-F1545, S203-F1545, I204-F1545, T205-F1545, Y206-F1545, S207-F1545, W208-F1545, Y209-F1545, D210-F1545, S211-F1545, I212-F1545, I213-F1545, L214-F1545, K215-F1545, G216-F1545, Y217-F1545, K218-F1545, R219-F1545, P220-F1545, L221-F1545, T222-F1545, L223-F1545, E224-F1545, D225-F1545, V226-F1545, W227-F1545, E228-F1545, V229-F1545, D230-F1545, E231-F1545, E232-F1545, M233-F1545, K234-F1545, T235-F1545, K236-F1545, T237-F1545, L238-F1545, V239-F1545, S240-F1545, K241-F1545, F242-F1545, E243-F1545, T244-F1545, H245-F1545, M246-F1545, K247-F1545, R248-F1545, E249-F1545, L250-F1545, Q251-F1545, K252-F1545, A253-F1545, R254-F1545, R255-F1545, A256-F1545, L257-F1545, Q258-F1545, R259-F1545, R260-F1545, Q261-F1545, E262-F1545, K263-F1545, S264-F1545, S265-F1545, Q266-F1545, Q267-F1545, N268-F1545, S269-F1545, G270-F1545, A271-F1545, R272-F1545, L273-F1545, P274-F1545, G275-F1545, L276-F1545, N277-F1545, K278-F1545, N279-F1545, Q280-F1545, S281-F1545, Q282-F1545, S283-F1545, Q284-F1545, D285-F1545, A286-F1545, L287-F1545, V288-F1545, L289-F1545, E290-F1545, D291-F1545, V292-F1545, E293-F1545, K294-F1545, K295-F1545, K296-F1545, K297-F1545, K298-F1545, S299-F1545, G300-F1545, T301-F1545, K302-F1545, K303-F1545, D304-F1545, V305-F1545, P306-F1545, K307-F1545, S308-F1545, W309-F1545, L310-F1545, M311-F1545, K312-F1545, A313-F1545, L314-F1545, F315-F1545, K316-F1545, T317-F1545, F318-F1545, Y319-F1545, M320-F1545, V321-F1545, L322-F1545, L323-F1545, K324-F1545, S325-F1545, F326-F1545, L327-F1545, L328-F1545, K329-F1545, L330-F1545, V331-F1545, N332-F1545, D333-F1545, I334-F1545, F335-F1545, T336-F1545, F337-F1545, V338-F1545, S339-F1545, P340-F1545, Q341-F1545, L342-F1545, L343-F1545, K344-F1545, L345-F1545, L346-F1545, I347-F1545, S348-F1545, F349-F1545, A350-F1545, S351-F1545, D352-F1545, R353-F1545, D354-F1545, T355-F1545, Y356-F1545, L357-F1545, W358-F1545, I359-F1545, G360-F1545, Y361-F1545, L362-F1545, C363-F1545, A364-F1545, I365-F1545, L366-F1545, L367-F1545, F368-F1545, T369-F1545, A370-F1545, A371-F1545, L372-F1545, I373-F1545, Q374-F1545, S375-F1545, F376-F1545, C377-F1545, L378-F1545, Q379-F1545, C380-F1545, Y381-F1545, F382-F1545, Q383-F1545, L384-F1545, C385-F1545, F386-F1545, K387-F1545, L388-F1545, G389-F1545, V390-F1545, K391-F1545, V392-F1545, R393-F1545, T394-F1545, A395-F1545, I396-F1545, M397-F1545, A398-F1545, S399-F1545, V400-F1545, Y401-F1545, K402-F1545, K403-F1545, A404-F1545, L405-F1545, T406-F1545, L407-F1545, S408-F1545, N409-F1545, L410-F1545, A411-F1545, R412-F1545, K413-F1545, E414-F1545, Y415-F1545, T416-F1545, V417-F1545, G418-F1545, E419-F1545, T420-F1545, V421-F1545, N422-F1545, L423-F1545, M424-F1545, S425-F1545, V426-F1545, D427-F1545, A428-F1545, Q429-F1545, K430-F1545, L431-F1545, M432-F1545, D433-F1545, V434-F1545, T435-F1545, N436-F1545, F437-F1545, M438-F1545, H439-F1545, M440-F1545, L441-F1545, W442-F1545, S443-F1545, S444-F1545, V445-F1545, L446-F1545, Q447-F1545, I448-F1545, V449-F1545, L450-F1545, S451-F1545, I452-F1545, F453-F1545, F454-F1545, L455-F1545, W456-F1545, R457-F1545, E458-F1545, L459-F1545, G460-F1545, P461-F1545, S462-F1545, V463-F1545, L464-F1545, A465-F1545, G466-F1545, V467-F1545, G468-F1545, V469-F1545, M470-F1545, V471-F1545, L472-F1545, V473-F1545, I474-F1545, P475-F1545, I476-F1545, N477-F1545, A478-F1545, I479-F1545, L480-F1545, S481-F1545, T482-F1545, K483-F1545, S484-F1545, K485-F1545, T486-F1545, I487-F1545, Q488-F1545, V489-F1545, K490-F1545, N491-F1545, M492-F1545, K493-F1545, N494-F1545, K495-F1545, D496-F1545, K497-F1545, R498-F1545, L499-F1545, K500-F1545, I501-F1545, M502-F1545, N503-F1545, E504-F1545, I505-F1545, L506-F1545, S507-F1545, G508-F1545, I509-F1545, K510-F1545, I511-F1545, L512-F1545, K513-F1545, Y514-F1545, F515-F1545, A516-F1545, W517-F1545, E518-F1545, P519-F1545, S520-F1545, F521-F1545, R522-F1545, D523-F1545, Q524-F1545, V525-F1545, Q526-F1545, N527-F1545, L528-F1545, R529-F1545, K530-F1545, K531-F1545, E532-F1545, L533-F1545, K534-F1545, N535-F1545, L536-F1545, L537-F1545, A538-F1545, F539-F1545, S540-F1545, Q541-F1545, L542-F1545, Q543-F1545, C544-F1545, V545-F1545, V546-F1545, I547-F1545, F548-F1545, V549-F1545, F550-F1545, Q551-F1545, L552-F1545, T553-F1545, P554-F1545, V555-F1545, L556-F1545, V557-F1545, S558-F1545, V559-F1545, V560-F1545, T561-F1545, F562-F1545, S563-F1545, V564-F1545, Y565-F1545, V566-F1545, L567-F1545, V568-F1545, D569-F1545, S570-F1545, N571-F1545, N572-F1545, I573-F1545, L574-F1545, D575-F1545, A576-F1545, Q577-F1545, K578-F1545, A579-F1545, F580-F1545, T581-F1545, S582-F1545, I583-F1545, T584-F1545, L585-F1545, F586-F1545, N587-F1545, I588-F1545, L589-F1545, R590-F1545, F591-F1545, P592-F1545, L593-F1545, S594-F1545, M595-F1545, L596-F1545, P597-F1545, M598-F1545, M599-F1545, I600-F1545, S601-F1545, S602-F1545, M603-F1545, L604-F1545, Q605-F1545, A606-F1545, S607-F1545, V608-F1545, S609-F1545, T610-F1545, E611-F1545, R612-F1545, L613-F1545, E614-F1545, K615-F1545, Y616-F1545, L617-F1545, G618-F1545, G619-F1545, D620-F1545, D621-F1545, L622-F1545, D623-F1545, T624-F1545, S625-F1545, A626-F1545, I627-F1545, R628-F1545, H629-F1545, D630-F1545, C631-F1545, N632-F1545, F633-F1545, D634-F1545, K635-F1545, A636-F1545, M637-F1545, Q638-F1545, F639-F1545, S640-F1545, E641-F1545, A642-F1545, S643-F1545, F644-F1545, T645-F1545, W646-F1545, E647-F1545, H648-F1545, D649-F1545, S650-F1545, E651-F1545, A652-F1545, T653-F1545, V654-F1545, R655-F1545, D656-F1545, V657-F1545, N658-F1545, L659-F1545, D660-F1545, I661-F1545, M662-F1545, A663-F1545, G664-F1545, Q665-F1545, L666-F1545, V667-F1545, A668-F1545, V669-F1545, and/or T670-F1545 of SEQ ID NO:42. Polynucleotide sequences encoding these polypeptides are also provided. The present invention also encompasses the use of these N-terminal cMOAT (SNP_ID:PS101s22) deletion polypeptides as immunogenic and/or antigenic epitopes as described elsewhere herein.

[0274] In preferred embodiments, the following C-terminal cMOAT (SNP_ID:PS101s22) deletion polypeptides are encompassed by the present invention: M1-F1545, M1-K1544, M1-T1543, M1-S1542, M1-N1541, M1-V1540, M1-N1539, M1-E1538, M1-I1537, M1-G1536, M1-A1535, M1-E1534, M1-K1533, M1-A1532, M1-M1531, M1-F1530, M1-Y1529, M1-F1528, M1-P1527, M1-G1526, M1-P1525, M1-I1524, M1-Q1523, M1-L1522, M1-L1521, M1-E1520, M1-E1519, M1-P1518, M1-S1517, M1-G1516, M1-Y1515, M1-E1514, M1-I1513, M1-I1512, M1-K1511, M1-G1510, M1-N1509, M1-D1508, M1-L1507, M1-V1506, M1-M1505, M1-V1504, M1-K1503, M1-D1502, M1-S1501, M1-D1500, M1-M1499, M1-I1498, M1-T1497, M1-H1496, M1-L1495, M1-R1494, M1-H1493, M1-A1492, M1-I1491, M1-T1490, M1-I1489, M1-V1488, M1-T1487, M1-C1486, M1-H1485, M1-A1484, M1-F1483, M1-E1482, M1-N1481, M1-Q1480, M1-I1479, M1-T1478, M1-T1477, M1-Q1476, M1-I1475, M1-L1474, M1-N1473, M1-D1472, M1-T1471, M1-E1470, M1-L1469, M1-D1468, M1-V1467, M1-A1466, M1-A1465, M1-T1464, M1-A1463, M1-E1462, M1-D1461, M1-L1460, M1-V1459, M1-L1458, M1-I1457, M1-K1456, M1-S1455, M1-K1454, M1-R1453, M1-L1452, M1-L1451, M1-A1450, M1-R1449, M1-G1448, M1-L1447, M1-C1446, M1-L1445, M1-L1444, M1-Q1443, M1-R1442, M1-Q1441, M1-G1440, M1-I1439, M1-S1438, M1-L1437, M1-N1436, M1-G1435, M1-G1434, M1-A1433, M1-E1432, M1-T1431, M1-V1430, M1-E1429, M1-H1428, M1-S1427, M1-L1426, M1-G1425, M1-L1424, M1-Q1423, M1-L1422, M1-S1421, M1-A1420, M1-V1419, M1-F1418, M1-S1417, M1-K1416, M1-L1415, M1-H1414, M1-A1413, M1-L1412, M1-E1411, M1-L1410, M1-A1409, M1-K1408, M1-W1407, M1-I1406, M1-E1405, M1-E1404, M1-D1403, M1-S1402, M1-Y1401, M1-N1400, M1-N1399, M1-F1398, M1-P1397, M1-D1396, M1-L1395, M1-N1394, M1-M1393, M1-R1392, M1-L1391, M1-S1390, M1-G1389, M1-S1388, M1-F1387, M1-L1386, M1-I1385, M1-P1384, M1-D1383, M1-Q1382, M1-P1381, M1-I1380, M1-I1379, M1-T1378, M1-L1377, M1-K1376, M1-E1375, M1-R1374, M1-L1373, M1-D1372, M1-H1371, M1-L1370, M1-G1369, M1-I1368, M1-S1367, M1-A1366, M1-I1365, M1-D1364, M1-V1363, M1-G1362, M1-D1361, M1-I1360, M1-I1359, M1-I1358, M1-Q1357, M1-G1356, M1-G1355, M1-A1354, M1-A1353, M1-E1352, M1-L1351, M1-I1350, M1-R1349, M1-F1348, M1-L1347, M1-C1346, M1-N1345, M1-T1344, M1-L1343, M1-S1342, M1-S1341, M1-K1340, M1-G1339, M1-A1338, M1-G1337, M1-T1336, M1-R1335, M1-G1334, M1-V1333, M1-V1332, M1-G1331, M1-I1330, M1-K1329, M1-E1328, M1-M1327, M1-S1326, M1-G1325, M1-I1324, M1-D1323, M1-C1322, M1-T1321, M1-I1320, M1-G1319, M1-R1318, M1-L1317, M1-V1316, M1-L1315, M1-D1314, M1-L1313, M1-E1312, M1-P1311, M1-R1310, M1-Y1309, M1-R1308, M1-V1307, M1-Q1306, M1-Y1305, M1-N1304, M1-N1303, M1-F1302, M1-Q1301, M1-I1300, M1-K1299, M1-G1298, M1-K1297, M1-S1296, M1-P1295, M1-W1294, M1-D1293, M1-P1292, M1-P1291, M1-P1290, M1-R1289, M1-K1288, M1-D1287, M1-T1286, M1-V1285, M1-W1284, M1-P1283, M1-A1282, M1-E1281, M1-N1280, M1-E1279, M1-V1278, M1-K1277, M1-T1276, M1-Y1275, M1-E1274, M1-T1273, M1-I1272, M1-R1271, M1-E1270, M1-V1269, M1-A1268, M1-V1267, M1-I1266, M1-N1265, M1-T1264, M1-E1263, M1-I1262, M1-E1261, M1-S1260, M1-T1259, M1-M1258, M1-R1257, M1-V1256, M1-L1255, M1-W1254, M1-N1253, M1-L1252, M1-T1251, M1-Q1250, M1-T1249, M1-I1248, M1-N1247, M1-L1246, M1-A1245, M1-N1244, M1-S1243, M1-L1242, M1-V1241, M1-F1240, M1-G1239, M1-V1238, M1-T1237, M1-D1236, M1-G1235, M1-S1234, M1-L1233, M1-T1232, M1-D1231, M1-R1230, M1-Y1229, M1-I1228, M1-V1227, M1-M1226, M1-M1225, M1-L1224, M1-A1223, M1-S1222, M1-F1221, M1-F1220, M1-V1219, M1-T1218, M1-L1217, M1-N1216, M1-G1215, M1-V1214, M1-L1213, M1-E1212, M1-L1211, M1-R1210, M1-I1209, M1-A1208, M1-L1207, M1-W1206, M1-R1205, M1-N1204, M1-S1203, M1-T1202, M1-I1201, M1-W1200, M1-S1199, M1-F1198, M1-V1197, M1-C1196, M1-K1195, M1-Q1194, M1-N1193, M1-T1192, M1-D1191, M1-I1190, M1-R1189, M1-E1188, M1-E1187, M1-N1186, M1-H1185, M1-K1184, M1-L1183, M1-F1182, M1-R1181, M1-Q1180, M1-Q1179, M1-H1178, M1-E1177, M1-F1176, M1-A1175, M1-R1174, M1-I1173, M1-V1172, M1-P1171, M1-L1170, M1-G1169, M1-S1168, M1-V1167, M1-T1166, M1-E1165, M1-S1164, M1-F1163, M1-H1162, M1-S1161, M1-Y1160, M1-I1159, M1-P1158, M1-S1157, M1-R1156, M1-T1155, M1-V1154, M1-S1153, M1-D1152, M1-L1151, M1-R1150, M1-R1149, M1-L1148, M1-Q1147, M1-R1146, M1-S1145, M1-T1144, M1-S1143, M1-V1142, M1-Y1141, M1-F1140, M1-M1139, M1-Q1138, M1-V1137, M1-S1136, M1-V1135, M1-Y1134, M1-I1133, M1-I1132, M1-G1131, M1-L1130, M1-P1129, M1-I1128, M1-V1127, M1-I1126, M1-I1125, M1-T1124, M1-F1123, M1-V1122, M1-P1121, M1-T1120, M1-A1119, M1-M1118, M1-C1117, M1-I1116, M1-M1115, M1-V1114, M1-L1113, M1-T1112, M1-S1111, M1-I1110, M1-I1109, M1-G1108, M1-L1107, M1-F1106, M1-C1105, M1-T1104, M1-I1103, M1-W1102, M1-S1101, M1-R1100, M1-L1099, M1-S1098, M1-Q1097, M1-P1096, M1-L1095, M1-T1094, M1-D1093, M1-D1092, M1-V1091, M1-T1090, M1-S1089, M1-I1088, M1-D1087, M1-G1086, M1-A1085, M1-F1084, M1-R1083, M1-N1082, M1-V1081, M1-I1080, M1-R1079, M1-G1078, M1-T1077, M1-P1076, M1-T1075, M1-T1074, M1-D1073, M1-F1072, M1-F1071, M1-R1070, M1-M1069, M1-P1068, M1-A1067, M1-R1066, M1-L1065, M1-I1064, M1-N1063, M1-N1062, M1-L1061, M1-L1060, M1-Q1059, M1-K1058, M1-H1057, M1-L1056, M1-I1055, M1-N1054, M1-S1053, M1-A1052, M1-H1051, M1-V1050, M1-F1049, M1-G1048, M1-F1047, M1-A1046, M1-S1045, M1-W1044, M1-F1043, M1-H1042, M1-A1041, M1-I1040, M1-F1039, M1-V1038, M1-F1037, M1-I1036, M1-G1035, M1-Q1034, M1-A1033, M1-L1032, M1-G1031, M1-L1030, M1-A1029, M1-G1028, M1-Y1027, M1-V1026, M1-G1025, M1-V1024, M1-R1023, M1-M1022, M1-D1021, M1-R1020, M1-Q1019, M1-S1018, M1-A1017, M1-P1016, M1-Y1015, M1-D1014, M1-T1013, M1-S1012, M1-N1011, M1-F1010, M1-I1009, M1-K1008, M1-S1007, M1-D1006, M1-S1005, M1-T1004, M1-W1003, M1-A1002, M1-S1001, M1-L1000, M1-W999, M1-L998, M1-N997, M1-S996, M1-G995, M1-I994, M1-F993, M1-A992, M1-V991, M1-S990, M1-N989, M1-M988, M1-V987, M1-F986, M1-A985, M1-L984, M1-I983, M1-I982, M1-F981, M1-F980, M1-I979, M1-S978, M1-F977, M1-L976, M1-G975, M1-I974, M1-A973, M1-Q972, M1-L971, M1-Y970, M1-E969, M1-L968, M1-Y967, M1-I966, M1-S965, M1-F964, M1-K963, M1-V962, M1-K961, M1-G960, M1-T959, M1-E958, M1-I957, M1-F956, M1-E955, M1-K954, M1-K953, M1-I952, M1-L951, M1-K950, M1-Q949, M1-G948, M1-K947, M1-V946, M1-L945, M1-E944, M1-E943, M1-D942, M1-E941, M1-K940, M1-L939, M1-S938, M1-N937, M1-V936, M1-N935, M1-R934, M1-T933, M1-K932, M1-L931, M1-S930, M1-N929, M1-R928, M1-L927, M1-S926, M1-K925, M1-L924, M1-H923, M1-R922, M1-G921, M1-N920, M1-S919, M1-R918, M1-S917, M1-S916, M1-R915, M1-S914, M1-L913, M1-T912, M1-R911, M1-R910, M1-F909, M1-S908, M1-N907, M1-E906, M1-R905, M1-R904, M1-M903, M1-T902, M1-I901, M1-S900, M1-A899, M1-A898, M1-D897, M1-E896, M1-P895, M1-I894, M1-E893, M1-E892, M1-V891, M1-S890, M1-S889, M1-I888, M1-L887, M1-G886, M1-Y885, M1-D884, M1-D883, M1-D882, M1-E881, M1-E880, M1-E879, M1-S878, M1-G877, M1-D876, M1-H875, M1-V874, M1-T873, M1-A872, M1-E871, M1-E870, M1-E869, M1-P868, M1-G867, M1-T866, M1-H865, M1-R864, M1-L863, M1-F862, M1-T861, M1-K860, M1-L859, M1-N858, M1-K857, M1-A856, M1-F855, M1-E854, M1-G853, M1-K852, M1-K851, M1-A850, M1-L849, M1-L848, M1-A847, M1-S846, M1-Y845, M1-S844, M1-G843, M1-K842, M1-E841, M1-V840, M1-I839, M1-T838, M1-G837, M1-N836, M1-G835, M1-L834, M1-V833, M1-V832, M1-I831, M1-E830, M1-D829, M1-V828, M1-Q827, M1-P826, M1-L825, M1-F824, M1-H823, M1-M822, M1-S821, M1-H820, M1-T819, M1-V818, M1-L817, M1-L816, M1-R815, M1-T814, M1-K813, M1-G812, M1-K811, M1-L810, M1-L809, M1-G808, M1-N807, M1-P806, M1-G805, M1-L804, M1-V803, M1-K802, M1-N801, M1-F800, M1-I799, M1-H798, M1-K797, M1-G796, M1-V795, M1-H794, M1-A793, M1-D792, M1-V791, M1-A790, M1-S789, M1-L788, M1-P787, M1-D786, M1-D785, M1-L784, M1-L783, M1-Y782, M1-I781, M1-D780, M1-L779, M1-N778, M1-Q777, M1-Y776, M1-T775, M1-A774, M1-R773, M1-A772, M1-L771, M1-S770, M1-I769, M1-R768, M1-Q767, M1-K766, M1-Q765, M1-G764, M1-G763, M1-S762, M1-L761, M1-N760, M1-I759, M1-G758, M1-K757, M1-E756, M1-G755, M1-I754, M1-E753, M1-A752, M1-L751, M1-D750, M1-G749, M1-G748, M1-P747, M1-L746, M1-M745, M1-E744, M1-L743, M1-D742, M1-P741, M1-L740, M1-L739, M1-A738, M1-C737, M1-A736, M1-E735, M1-L734, M1-V733, M1-Q732, M1-Q731, M1-Y730, M1-R729, M1-K728, M1-E727, M1-N726, M1-F725, M1-E724, M1-T723, M1-G722, M1-F721, M1-L720, M1-I719, M1-N718, M1-D717, M1-K716, M1-I715, M1-T714, M1-G713, M1-N712, M1-Q711, M1-I710, M1-W709, M1-S708, M1-Q707, M1-Q706, M1-P705, M1-V704, M1-Y703, M1-A702, M1-T701, M1-T700, M1-G699, M1-K698, M1-I697, M1-T696, M1-I695, M1-H694, M1-G693, M1-H692, M1-V691, M1-N690, M1-E689, M1-M688, M1-E687, M1-G686, M1-L685, M1-M684, M1-A683, M1-S682, M1-I681, M1-L680, M1-S679, M1-S678, M1-K677, M1-G676, M1-S675, M1-G674, M1-V673, M1-P672, M1-G671, and/or M1-T670 of SEQ ID NO:42. Polynucleotide sequences encoding these polypeptides are also provided. The present invention also encompasses the use of these C-terminal cMOAT (SNP_ID:PS101s22) deletion polypeptides as immunogenic and/or antigenic epitopes as described elsewhere herein.

[0275] Alternatively, preferred polypeptides of the present invention may comprise polypeptide sequences corresponding to, for example, internal regions of the cMOAT (SNP_ID: PS101s22) polypeptide (e.g., any combination of both N- and C-terminal cMOAT (SNP_ID: PS101s22) polypeptide deletions) of SEQ ID NO:42. For example, internal regions could be defined by the equation: amino acid NX to amino acid CX, wherein NX refers to any N-terminal deletion polypeptide amino acid of cMOAT (SNP_ID: PS101s22) (SEQ ID NO:42), and where CX refers to any C-terminal deletion polypeptide amino acid of cMOAT (SNP_ID: PS101s22) (SEQ ID NO:42). Polynucleotides encoding these polypeptides are also provided. The present invention also encompasses the use of these polypeptides as an immunogenic and/or antigenic epitope as described elsewhere herein. Preferably, the resulting deletion polypeptide comprises the polypeptide polymorphic loci identified elsewhere herein for cMOAT (SNP_ID: PS101s22), and more preferably comprises the polypeptide polymorphic allele identified elsewhere herein for cMOAT (SNP_ID: PS101s22).

### Features of the Polypeptide Encoded by Gene No:20

[0276] The present invention relates to isolated nucleic acid molecules comprising, or alternatively, consisting of all or a portion of the variant allele of the human cMOAT, ATP-binding cassette sub-family C member 2 gene (SNP_ID: PS101s230) (e.g., wherein reference or wildtype cMOAT gene is exemplified by SEQ ID NO:1). Preferred portions are at least 10, preferably at least 20, preferably at least 40, preferably at least 100, contiguous polynucleotides and comprise an “A” at the nucleotide position corresponding to nucleotide 1350 of the cMOAT gene, or a portion of SEQ ID NO:43. Alternatively, preferred portions are at least 10, preferably at least 20, preferably at least 40, preferably at least 100, contiguous polynucleotides and comprise a “G” at the nucleotide position corresponding to nucleotide 1350 of the cMOAT gene, or a portion of SEQ ID NO:43. The invention further relates to isolated gene products, e.g., polypeptides and/or proteins, which are encoded by a nucleic acid molecule comprising all or a portion of the variant allele of the cMOAT gene.

[0277] In one embodiment, the invention relates to a method for predicting the likelihood that an individual will have a disorder associated with an “A” at the nucleotide position corresponding to nucleotide position 1350 of SEQ ID NO:43 (or diagnosing or aiding in the diagnosis of such a disorder) comprising the steps of obtaining a DNA sample from an individual to be assessed and determining the nucleotide present at position 1350 of SEQ ID NO:43. The presence of an “A” at this position indicates that the individual has a greater likelihood of having a disorder associated therewith than an individual having a “G” at that position, or a greater likelihood of having more severe symptoms.

[0278] Conversely, the invention relates to a method for predicting the likelihood that an individual will have a disorder associated with a “G” at the nucleotide position corresponding to nucleotide position 1350 of SEQ ID NO:43 (or diagnosing or aiding in the diagnosis of such a disorder) comprising the steps of obtaining a DNA sample from an individual to be assessed and determining the nucleotide present at position 1350 of SEQ ID NO:43. The presence of a “G” at this position indicates that the individual has a greater likelihood of having a disorder associated therewith than an individual having an “A” at that position, or a greater likelihood of having more severe symptoms.

[0279] The present invention further relates to isolated proteins or polypeptides comprising, or alternatively, consisting of all or a portion of the encoded variant amino acid sequence of the human human cMOAT, solute carrier family 21 member 6 polypeptide (e.g., wherein reference or wildtype human cMOAT, solute carrier family 21 member 6 polypeptide is exemplified by SEQ ID NO:2). Preferred portions are at least 10, preferably at least 20, preferably at least 40, preferably at least 100, contiguous polypeptides and comprises a “I” at the amino acid position corresponding to amino acid 417 of the cMOAT polypeptide, or a portion of SEQ ID NO:44. Alternatively, preferred portions are at least 10, preferably at least 20, preferably at least 40, preferably at least 100, contiguous polypeptides and comprises a “V” at the amino acid position corresponding to amino acid 417 of the cMOAT protein, or a portion of SEQ ID NO:44. The invention further relates to isolated nucleic acid molecules encoding such polypeptides or proteins, as well as to antibodies that bind to such proteins or polypeptides.

[0280] Representative disorders which may be detected, diagnosed, identified, treated, prevented, and/or ameliorated by the present invention include, the following, non-limiting diseases and disorders: decreased heptic uptake of administered statins, resistance to beneficial responses of administered statins; resistance to LDL lowering responses to administered statins; resistance to TG lowering responses to administered statins; resistance to HDL elevating responses to administered statins; increased incidence of drug interactions between one or more administered statins; increased incidence of drug and endogenous substance interactions between a statin drug and endogenous substrates of cMOAT including cholate, taurocholate, thyroid hormones T3 and T4, DHEAS, estradiol-17beta-glucuronide, estrone-3-sulfate, prostaglandin E2, thromboxane B2, leukotriene C4, leukotriene E4, and bilirubin and its conjugates; decreased response to HMG-CoA reductase inhibitors; in addition to other disorders referenced herein, which include, for example, any disorder related to high levels of circulating LDL, high levels of TG, and/or low levels of circularing HDL, which include, but are not limited to, cardiovascular diseases, hepatic diseases, angina pectoris, hypertension, heart failure, myocardial infarction, ventricular hypertrophy, vascular diseases, miscrovascular disease, vascular leak syndrome, aneurysm, stroke, embolism, thrombosis, endothelial dysfunction, coronary artery disease, arteriosclerosis, and/or atherosclerosis.

[0281] In preferred embodiments, the following N-terminal cMOAT (SNP_ID:PS101s23) deletion polypeptides are encompassed by the present invention: M1-F1545, L2-F1545, E3-F1545, K4-F1545, F5-F1545, C6-F1545, N7-F1545, S8-F1545, T9-F1545, F10-F1545, W11-F1545, N12-F1545, S13-F1545, S14-F1545, F15-F1545, L16-F1545, D17-F1545, S18-F1545, P19-F1545, E20-F1545, A21-F1545, D22-F1545, L23-F1545, P24-F1545, L25-F1545, C26-F1545, F27-F1545, E28-F1545, Q29-F1545, T30-F1545, V31-F1545, L32-F1545, V33-F1545, W34-F1545, I35-F1545, P36-F1545, L37-F1545, G38-F1545, F39-F1545, L40-F1545, W41-F1545, L42-F1545, L43-F1545, A44-F1545, P45-F1545, W46-F1545, Q47-F1545, L48-F1545, L49-F1545, H50-F1545, V51-F1545, Y52-F1545, K53-F1545, S54-F1545, R55-F1545, T56-F1545, K57-F1545, R58-F1545, S59-F1545, S60-F1545, T61-F1545, T62-F1545, K63-F1545, L64-F1545, Y65-F1545, L66-F1545, A67-F1545, K68-F1545, Q69-F1545, V70-F1545, F71-F1545, V72-F1545, G73-F1545, F74-F1545, L75-F1545, L76-F1545, I77-F1545, L78-F1545, A79-F1545, A80-F1545, I81-F1545, E82-F1545, L83-F1545, A84-F1545, L85-F1545, V86-F1545, L87-F1545, T88-F1545, E89-F1545, D90-F1545, S91-F1545, G92-F1545, Q93-F1545, A94-F1545, T95-F1545, V96-F1545, P97-F1545, A98-F1545, V99-F1545, R100-F1545, Y101-F1545, T102-F1545, N103-F1545, P104-F1545, S105-F1545, L106-F1545, Y107-F1545, L108-F1545, G109-F1545, T110-F1545, W111-F1545, L112-F1545, L113-F1545, V114-F1545, L115-F1545, L116-F1545, I117-F1545, Q118-F1545, Y119-F1545, S120-F1545, R121-F1545, Q122-F1545, W123-F1545, C124-F1545, V125-F1545, Q126-F1545, K127-F1545, N128-F1545, S129-F1545, W130-F1545, F131-F1545, L132-F1545, S133-F1545, L134-F1545, F135-F1545, W136-F1545, I137-F1545, L138-F1545, S139-F1545, I140-F1545, L141-F1545, C142-F1545, G143-F1545, T144-F1545, F145-F1545, Q146-F1545, F147-F1545, Q148-F1545, T149-F1545, L150-F1545, I151-F1545, R152-F1545, T153-F1545, L154-F1545, L155-F1545, Q156-F1545, G157-F1545, D158-F1545, N159-F1545, S160-F1545, N161-F1545, L162-F1545, A163-F1545, Y164-F1545, S165-F1545, C166-F1545, L167-F1545, F168-F1545, F169-F1545, I170-F1545, S171-F1545, Y172-F1545, G173-F1545, F174-F1545, Q175-F1545, I176-F1545, L177-F1545, I178-F1545, L179-F1545, I180-F1545, F181-F1545, S182-F1545, A183-F1545, F184-F1545, S185-F1545, E186-F1545, N187-F1545, N188-F1545, E189-F1545, S190-F1545, S191-F1545, N192-F1545, N193-F1545, P194-F1545, S195-F1545, S196-F1545, I197-F1545, A198-F1545, S199-F1545, F200-F1545, L201-F1545, S202-F1545, S203-F1545, I204-F1545, T205-F1545, Y206-F1545, S207-F1545, W208-F1545, Y209-F1545, D210-F1545, S211-F1545, I212-F1545, I213-F1545, L214-F1545, K215-F1545, G216-F1545, Y217-F1545, K218-F1545, R219-F1545, P220-F1545, L221-F1545, T222-F1545, L223-F1545, E224-F1545, D225-F1545, V226-F1545, W227-F1545, E228-F1545, V229-F1545, D230-F1545, E231-F1545, E232-F1545, M233-F1545, K234-F1545, T235-F1545, K236-F1545, T237-F1545, L238-F1545, V239-F1545, S240-F1545, K241-F1545, F242-F1545, E243-F1545, T244-F1545, H245-F1545, M246-F1545, K247-F1545, R248-F1545, E249-F1545, L250-F1545, Q251-F1545, K252-F1545, A253-F1545, R254-F1545, R255-F1545, A256-F1545, L257-F1545, Q258-F1545, R259-F1545, R260-F1545, Q261-F1545, E262-F1545, K263-F1545, S264-F1545, S265-F1545, Q266-F1545, Q267-F1545, N268-F1545, S269-F1545, G270-F1545, A271-F1545, R272-F1545, L273-F1545, P274-F1545, G275-F1545, L276-F1545, N277-F1545, K278-F1545, N279-F1545, Q280-F1545, S281-F1545, Q282-F1545, S283-F1545, Q284-F1545, D285-F1545, A286-F1545, L287-F1545, V288-F1545, L289-F1545, E290-F1545, D291-F1545, V292-F1545, E293-F1545, K294-F1545, K295-F1545, K296-F1545, K297-F1545, K298-F1545, S299-F1545, G300-F1545, T301-F1545, K302-F1545, K303-F1545, D304-F1545, V305-F1545, P306-F1545, K307-F1545, S308-F1545, W309-F1545, L310-F1545, M311-F1545, K312-F1545, A313-F1545, L314-F1545, F315-F1545, K316-F1545, T317-F1545, F318-F1545, Y319-F1545, M320-F1545, V321-F1545, L322-F1545, L323-F1545, K324-F1545, S325-F1545, F326-F1545, L327-F1545, L328-F1545, K329-F1545, L330-F1545, V331-F1545, N332-F1545, D333-F1545, I334-F1545, F335-F1545, T336-F1545, F337-F1545, V338-F1545, S339-F1545, P340-F1545, Q341-F1545, L342-F1545, L343-F1545, K344-F1545, L345-F1545, L346-F1545, I347-F1545, S348-F1545, F349-F1545, A350-F1545, S351-F1545, D352-F1545, R353-F1545, D354-F1545, T355-F1545, Y356-F1545, L357-F1545, W358-F1545, I359-F1545, G360-F1545, Y361-F1545, L362-F1545, C363-F1545, A364-F1545, I365-F1545, L366-F1545, L367-F1545, F368-F1545, T369-F1545, A370-F1545, A371-F1545, L372-F1545, I373-F1545, Q374-F1545, S375-F1545, F376-F1545, C377-F1545, L378-F1545, Q379-F1545, C380-F1545, Y381-F1545, F382-F1545, Q383-F1545, L384-F1545, C385-F1545, F386-F1545, K387-F1545, L388-F1545, G389-F1545, V390-F1545, K391-F1545, V392-F1545, R393-F1545, T394-F1545, A395-F1545, I396-F1545, M397-F1545, A398-F1545, S399-F1545, V400-F1545, Y401-F1545, K402-F1545, K403-F1545, A404-F1545, L405-F1545, T406-F1545, L407-F1545, S408-F1545, N409-F1545, L410-F1545, A411-F1545, R412-F1545, K413-F1545, E414-F1545, Y415-F1545, T416-F1545, and/or 1417-F1545 of SEQ ID NO:44. Polynucleotide sequences encoding these polypeptides are also provided. The present invention also encompasses the use of these N-terminal cMOAT (SNP_ID:PS101s23) deletion polypeptides as immunogenic and/or antigenic epitopes as described elsewhere herein.

[0282] In preferred embodiments, the following C-terminal cMOAT (SNP_ID:PS101s23) deletion polypeptides are encompassed by the present invention: M1-F1545, M1-K1544, M1-T1543, M1-S1542, M1-N1541, M1-V1540, M1-N1539, M1-E1538, M1-I1537, M1-G1536, M1-A1535, M1-E1534, M1-K1533, M1-A1532, M1-M1531, M1-F1530, M1-Y1529, M1-F1528, M1-P1527, M1-G1526, M1-P1525, M1-I1524, M1-Q1523, M1-L1522, M1-L1521, M1-E1520, M1-E1519, M1-P1518, M1-S1517, M1-G1516, M1-Y1515, M1-E1514, M1-I1513, M1-I1512, M1-K1511, M1-G1510, M1-N1509, M1-D1508, M1-L1507, M1-V1506, M1-M1505, M1-V1504, M1-K1503, M1-D1502, M1-S1501, M1-D1500, M1-M1499, M1-I1498, M1-T1497, M1-H1496, M1-L1495, M1-R1494, M1-H1493, M1-A1492, M1-I1491, M1-T1490, M1-I1489, M1-V1488, M1-T1487, M1-C1486, M1-H1485, M1-A1484, M1-F1483, M1-E1482, M1-N1481, M1-Q1480, M1-I1479, M1-T1478, M1-T1477, M1-Q1476, M1-I1475, M1-L1474, M1-N1473, M1-D1472, M1-T1471, M1-E1470, M1-L1469, M1-D1468, M1-V1467, M1-A1466, M1-A1465, M1-T1464, M1-A1463, M1-E1462, M1-D1461, M1-L1460, M1-V1459, M1-L1458, M1-I1457, M1-K1456, M1-S1455, M1-K1454, M1-R1453, M1-L1452, M1-L1451, M1-A1450, M1-R1449, M1-G1448, M1-L1447, M1-C1446, M1-L1445, M1-L1444, M1-Q1443, M1-R1442, M1-Q1441, M1-G1440, M1-I1439, M1-S1438, M1-L1437, M1-N1436, M1-G1435, M1-G1434, M1-A1433, M1-E1432, M1-T1431, M1-V1430, M1-E1429, M1-H1428, M1-S1427, M1-L1426, M1-G1425, M1-L1424, M1-Q1423, M1-L1422, M1-S1421, M1-A1420, M1-V1419, M1-F1418, M1-S1417, M1-K1416, M1-L1415, M1-H1414, M1-A1413, M1-L1412, M1-E1411, M1-L1410, M1-A1409, M1-K1408, M1-W1407, M1-I1406, M1-E1405, M1-E1404, M1-D1403, M1-S1402, M1-Y1401, M1-N1400, M1-N1399, M1-F1398, M1-P1397, M1-D1396, M1-L1395, M1-N1394, M1-M1393, M1-R1392, M1-L1391, M1-S1390, M1-G1389, M1-S1388, M1-F1387, M1-L1386, M1-I1385, M1-P1384, M1-D1383, M1-Q1382, M1-P1381, M1-I1380, M1-I1379, M1-T1378, M1-L1377, M1-K1376, M1-E1375, M1-R1374, M1-L1373, M1-D1372, M1-H1371, M1-L1370, M1-G1369, M1-I1368, M1-S1367, M1-A1366, M1-I1365, M1-D1364, M1-V1363, M1-G1362, M1-D1361, M1-I1360, M1-I1359, M1-I1358, M1-Q1357, M1-G1356, M1-G1355, M1-A1354, M1-A1353, M1-E1352, M1-L1351, M1-I1350, M1-R1349, M1-F1348, M1-L1347, M1-C1346, M1-N1345, M1-T1344, M1-L1343, M1-S1342, M1-S1341, M1-K1340, M1-G1339, M1-A1338, M1-G1337, M1-T1336, M1-R1335, M1-G1334, M1-V1333, M1-V1332, M1-G1331, M1-I1330, M1-K1329, M1-E1328, M1-M1327, M1-S1326, M1-G1325, M1-I1324, M1-D1323, M1-C1322, M1-T1321, M1-I1320, M1-G1319, M1-R1318, M1-L1317, M1-V1316, M1-L1315, M1-D1314, M1-L1313, M1-E1312, M1-P1311, M1-R1310, M1-Y1309, M1-R1308, M1-V1307, M1-Q1306, M1-Y1305, M1-N1304, M1-N1303, M1-F1302, M1-Q1301, M1-I1300, M1-K1299, M1-G1298, M1-K1297, M1-S1296, M1-P1295, M1-W1294, M1-D1293, M1-P1292, M1-P1291, M1-P1290, M1-R1289, M1-K1288, M1-D1287, M1-T1286, M1-V1285, M1-W1284, M1-P1283, M1-A1282, M1-E1281, M1-N1280, M1-E1279, M1-V1278, M1-K1277, M1-T1276, M1-Y1275, M1-E1274, M1-T1273, M1-I1272, M1-R1271, M1-E1270, M1-V1269, M1-A1268, M1-V1267, M1-I1266, M1-N1265, M1-T1264, M1-E1263, M1-I1262, M1-E1261, M1-S1260, M1-T1259, M1-M1258, M1-R1257, M1-V1256, M1-L1255, M1-W1254, M1-N1253, M1-L1252, M1-T1251, M1-Q1250, M1-T1249, M1-I1248, M1-N1247, M1-L1246, M1-A1245, M1-N1244, M1-S1243, M1-L1242, M1-V1241, M1-F1240, M1-G1239, M1-V1238, M1-T1237, M1-D1236, M1-G1235, M1-S1234, M1-L1233, M1-T1232, M1-D1231, M1-R1230, M1-Y1229, M1-I1228, M1-V1227, M1-M1226, M1-M1225, M1-L1224, M1-A1223, M1-S1222, M1-F1221, M1-F1220, M1-V1219, M1-T1218, M1-L1217, M1-N1216, M1-G1215, M1-V1214, M1-L1213, M1-E1212, M1-L1211, M1-R1210, M1-I1209, M1-A1208, M1-L1207, M1-W1206, M1-R1205, M1-N1204, M1-S1203, M1-T1202, M1-I1201, M1-W1200, M1-S1199, M1-F1198, M1-V1197, M1-C1196, M1-K1195, M1-Q1194, M1-N1193, M1-T1192, M1-D1191, M1-I1190, M1-R1189, M1-E1188, M1-E1187, M1-N1186, M1-H1185, M1-K1184, M1-L1183, M1-F1182, M1-R1181, M1-Q1180, M1-Q1179, M1-H1178, M1-E1177, M1-F1176, M1-A1175, M1-R1174, M1-I1173, M1-V1172, M1-P1171, M1-L1170, M1-G1169, M1-S1168, M1-V1167, M1-T1166, M1-E1165, M1-S1164, M1-F1163, M1-H1162, M1-S1161, M1-Y1160, M1-I1159, M1-P1158, M1-S1157, M1-R1156, M1-T1155, M1-V1154, M1-S1153, M1-D1152, M1-L1151, M1-R1150, M1-R1149, M1-L1148, M1-Q1147, M1-R1146, M1-S1145, M1-T1144, M1-S1143, M1-V1142, M1-Y1141, M1-F1140, M1-M1139, M1-Q1138, M1-V1137, M1-S1136, M1-V1135, M1-Y1134, M1-I1133, M1-I1132, M1-G1131, M1-L1130, M1-P1129, M1-I1128, M1-V1127, M1-I1126, M1-I1125, M1-T1124, M1-F1123, M1-V1122, M1-P1121, M1-T1120, M1-A1119, M1-M1118, M1-C1117, M1-I1116, M1-M1115, M1-V1114, M1-L1113, M1-T1112, M1-S1111, M1-I1110, M1-I1109, M1-G1108, M1-L1107, M1-F1106, M1-C1105, M1-T1104, M1-I1103, M1-W1102, M1-S1101, M1-R1100, M1-L1099, M1-S1098, M1-Q1097, M1-P1096, M1-L1095, M1-T1094, M1-D1093, M1-D1092, M1-V1091, M1-T1090, M1-S1089, M1-I1088, M1-D1087, M1-G1086, M1-A1085, M1-F1084, M1-R1083, M1-N1082, M1-V1081, M1-I1080, M1-R1079, M1-G1078, M1-T1077, M1-P1076, M1-T1075, M1-T1074, M1-D1073, M1-F1072, M1-F1071, M1-R1070, M1-M1069, M1-P1068, M1-A1067, M1-R1066, M1-L1065, M1-I1064, M1-N1063, M1-N1062, M1-L1061, M1-L1060, M1-Q1059, M1-K1058, M1-H1057, M1-L1056, M1-I1055, M1-N1054, M1-S1053, M1-A1052, M1-H1051, M1-V1050, M1-F1049, M1-G1048, M1-F1047, M1-A1046, M1-S1045, M1-W1044, M1-F1043, M1-H1042, M1-A1041, M1-I1040, M1-F1039, M1-V1038, M1-F1037, M1-I1036, M1-G1035, M1-Q1034, M1-A1033, M1-L1032, M1-G1031, M1-L1030, M1-A1029, M1-G1028, M1-Y1027, M1-V1026, M1-G1025, M1-V1024, M1-R1023, M1-M1022, M1-D1021, M1-R1020, M1-Q1019, M1-S1018, M1-A1017, M1-P1016, M1-Y1015, M1-D1014, M1-T1013, M1-S1012, M1-N1011, M1-F1010, M1-I1009, M1-K1008, M1-S1007, M1-D1006, M1-S1005, M1-T1004, M1-W1003, M1-A1002, M1-S1001, M1-L1000, M1-W999, M1-L998, M1-N997, M1-S996, M1-G995, M1-I994, M1-F993, M1-A992, M1-V991, M1-S990, M1-N989, M1-M988, M1-V987, M1-F986, M1-A985, M1-L984, M1-I983, M1-I982, M1-F981, M1-F980, M1-I979, M1-S978, M1-F977, M1-L976, M1-G975, M1-I974, M1-A973, M1-Q972, M1-L971, M1-Y970, M1-E969, M1-L968, M1-Y967, M1-I966, M1-S965, M1-F964, M1-K963, M1-V962, M1-K961, M1-G960, M1-T959, M1-E958, M1-I957, M1-F956, M1-E955, M1-K954, M1-K953, M1-I952, M1-L951, M1-K950, M1-Q949, M1-G948, M1-K947, M1-V946, M1-L945, M1-E944, M1-E943, M1-D942, M1-E941, M1-K940, M1-L939, M1-S938, M1-N937, M1-V936, M1-N935, M1-R934, M1-T933, M1-K932, M1-L931, M1-S930, M1-N929, M1-R928, M1-L927, M1-S926, M1-K925, M1-L924, M1-H923, M1-R922, M1-G921, M1-N920, M1-S919, M1-R918, M1-S917, M1-S916, M1-R915, M1-S914, M1-L913, M1-T912, M1-R911, M1-R910, M1-F909, M1-S908, M1-N907, M1-E906, M1-R905, M1-R904, M1-M903, M1-T902, M1-I901, M1-S900, M1-A899, M1-A898, M1-D897, M1-E896, M1-P895, M1-I894, M1-E893, M1-E892, M1-V891, M1-S890, M1-S889, M1-I888, M1-L887, M1-G886, M1-Y885, M1-D884, M1-D883, M1-D882, M1-E881, M1-E880, M1-E879, M1-S878, M1-G877, M1-D876, M1-H875, M1-V874, M1-T873, M1-A872, M1-E871, M1-E870, M1-E869, M1-P868, M1-G867, M1-T866, M1-H865, M1-R864, M1-L863, M1-F862, M1-T861, M1-K860, M1-L859, M1-N858, M1-K857, M1-A856, M1-F855, M1-E854, M1-G853, M1-K852, M1-K851, M1-A850, M1-L849, M1-L848, M1-A847, M1-S846, M1-Y845, M1-S844, M1-G843, M1-K842, M1-E841, M1-V840, M1-I839, M1-T838, M1-G837, M1-N836, M1-G835, M1-L834, M1-V833, M1-V832, M1-I831, M1-E830, M1-D829, M1-V828, M1-Q827, M1-P826, M1-L825, M1-F824, M1-H823, M1-M822, M1-S821, M1-H820, M1-T819, M1-V818, M1-L817, M1-L816, M1-R815, M1-T814, M1-K813, M1-G812, M1-K811, M1-L810, M1-L809, M1-G808, M1-N807, M1-P806, M1-G805, M1-L804, M1-V803, M1-K802, M1-N801, M1-F800, M1-I799, M1-H798, M1-K797, M1-G796, M1-V795, M1-H794, M1-A793, M1-D792, M1-V791, M1-A790, M1-S789, M1-L788, M1-P787, M1-D786, M1-D785, M1-L784, M1-L783, M1-Y782, M1-I781, M1-D780, M1-L779, M1-N778, M1-Q777, M1-Y776, M1-T775, M1-A774, M1-R773, M1-A772, M1-L771, M1-S770, M1-I769, M1-R768, M1-Q767, M1-K766, M1-Q765, M1-G764, M1-G763, M1-S762, M1-L761, M1-N760, M1-I759, M1-G758, M1-K757, M1-E756, M1-G755, M1-I754, M1-E753, M1-A752, M1-L751, M1-D750, M1-G749, M1-G748, M1-P747, M1-L746, M1-M745, M1-E744, M1-L743, M1-D742, M1-P741, M1-L740, M1-L739, M1-A738, M1-C737, M1-A736, M1-E735, M1-L734, M1-V733, M1-Q732, M1-Q731, M1-Y730, M1-R729, M1-K728, M1-E727, M1-N726, M1-F725, M1-E724, M1-T723, M1-G722, M1-F721, M1-L720, M1-I719, M1-N718, M1-D717, M1-K716, M1-I715, M1-T714, M1-G713, M1-N712, M1-Q711, M1-I710, M1-W709, M1-S708, M1-Q707, M1-Q706, M1-P705, M1-V704, M1-Y703, M1-A702, M1-T701, M1-T700, M1-G699, M1-K698, M1-I697, M1-T696, M1-I695, M1-H694, M1-G693, M1-H692, M1-V691, M1-N690, M1-E689, M1-M688, M1-E687, M1-G686, M1-L685, M1-M684, M1-A683, M1-S682, M1-I681, M1-L680, M1-S679, M1-S678, M1-K677, M1-G676, M1-S675, M1-G674, M1-V673, M1-P672, M1-G671, M1-I670, M1-V669, M1-A668, M1-V667, M1-L666, M1-Q665, M1-G664, M1-A663, M1-M662, M1-I661, M1-D660, M1-L659, M1-N658, M1-V657, M1-D656, M1-R655, M1-V654, M1-T653, M1-A652, M1-E651, M1-S650, M1-D649, M1-H648, M1-E647, M1-W646, M1-T645, M1-F644, M1-S643, M1-A642, M1-E641, M1-S640, M1-F639, M1-Q638, M1-M637, M1-A636, M1-K635, M1-D634, M1-F633, M1-N632, M1-C631, M1-D630, M1-H629, M1-R628, M1-I627, M1-A626, M1-S625, M1-T624, M1-D623, M1-L622, M1-D621, M1-D620, M1-G619, M1-G618, M1-L617, M1-Y616, M1-K615, M1-E614, M1-L613, M1-R612, M1-E611, M1-T610, M1-S609, M1-V608, M1-S607, M1-A606, M1-Q605, M1-L604, M1-M603, M1-S602, M1-S601, M1-I600, M1-M599, M1-M598, M1-P597, M1-L596, M1-M595, M1-S594, M1-L593, M1-P592, M1-F591, M1-R590, M1-L589, M1-I588, M1-N587, M1-F586, M1-L585, M1-T584, M1-I583, M1-S582, M1-T581, M1-F580, M1-A579, M1-K578, M1-Q577, M1-A576, M1-D575, M1-L574, M1-I573, M1-N572, M1-N571, M1-S570, M1-D569, M1-V568, M1-L567, M1-V566, M1-Y565, M1-V564, M1-S563, M1-F562, M1-T561, M1-V560, M1-V559, M1-S558, M1-V557, M1-L556, M1-V555, M1-P554, M1-T553, M1-L552, M1-Q551, M1-F550, M1-V549, M1-F548, M1-I547, M1-V546, M1-V545, M1-C544, M1-Q551, M1-L542, M1-Q541, M1-S540, M1-F539, M1-A538, M1-L537, M1-L536, M1-N535, M1-K534, M1-L533, M1-E532, M1-K531, M1-K530, M1-R529, M1-L528, M1-N527, M1-Q526, M1-V525, M1-Q524, M1-D523, M1-R522, M1-F521, M1-S520, M1-P519, M1-E518, M1-W517, M1-A516, M1-F515, M1-Y514, M1-K513, M1-L512, M1-I511, M1-K510, M1-I509, M1-G508, M1-S507, M1-L506, M1-I505, M1-E504, M1-N503, M1-M502, M1-I501, M1-K500, M1-L499, M1-R498, M1-K497, M1-D496, M1-K495, M1-N494, M1-K493, M1-M492, M1-N491, M1-K490, M1-V489, M1-Q488, M1-I487, M1-T486, M1-K485, M1-S484, M1-K483, M1-T482, M1-S481, M1-L480, M1-I479, M1-A478, M1-N477, M1-I476, M1-P475, M1-I474, M1-V473, M1-L472, M1-V471, M1-M470, M1-V469, M1-G468, M1-V467, M1-G466, M1-A465, M1-L464, M1-V463, M1-S462, M1-P461, M1-G460, M1-L459, M1-E458, M1-R457, M1-W456, M1-L455, M1-F454, M1-F453, M1-I452, M1-S451, M1-L450, M1-V449, M1-I448, M1-Q447, M1-L446, M1-V445, M1-S444, M1-S443, M1-W442, M1-L441, M1-M440, M1-H439, M1-M438, M1-F437, M1-N436, M1-T435, M1-V434, M1-D433, M1-M432, M1-L431, M1-K430, M1-Q429, M1-A428, M1-D427, M1-V426, M1-S425, M1-M424, M1-L423, M1-N422, M1-V421, M1-T420, M1-E419, M1-G418, and/or M1-I417 of SEQ ID NO:44. Polynucleotide sequences encoding these polypeptides are also provided. The present invention also encompasses the use of these C-terminal cMOAT (SNP_ID:PS101s23) deletion polypeptides as immunogenic and/or antigenic epitopes as described elsewhere herein.

[0283] Alternatively, preferred polypeptides of the present invention may comprise polypeptide sequences corresponding to, for example, internal regions of the cMOAT (SNP_ID: PS101s23) polypeptide (e.g., any combination of both N- and C-terminal cMOAT (SNP_ID: PS101s23) polypeptide deletions) of SEQ ID NO:44. For example, internal regions could be defined by the equation: amino acid NX to amino acid CX, wherein NX refers to any N-terminal deletion polypeptide amino acid of cMOAT (SNP_ID: PS101s23) (SEQ ID NO:44), and where CX refers to any C-terminal deletion polypeptide amino acid of cMOAT (SNP_ID: PS101s23) (SEQ ID NO:44). Polynucleotides encoding these polypeptides are also provided. The present invention also encompasses the use of these polypeptides as an immunogenic and/or antigenic epitope as described elsewhere herein. Preferably, the resulting deletion polypeptide comprises the polypeptide polymorphic loci identified elsewhere herein for cMOAT (SNP_ID: PS101s23), and more preferably comprises the polypeptide polymorphic allele identified elsewhere herein for cMOAT (SNP_ID: PS 101s23).

### Features of the Polypeptide Encoded by Gene No:21

[0284] The present invention relates to isolated nucleic acid molecules comprising, or alternatively, consisting of all or a portion of the variant allele of the human cMOAT, ATP-binding cassette sub-family C member 2 gene (SNP_ID: PS101s24) (e.g., wherein reference or wildtype cMOAT gene is exemplified by SEQ ID NO:1). Preferred portions are at least 10, preferably at least 20, preferably at least 40, preferably at least 100, contiguous polynucleotides and comprise a “T at the nucleotide position corresponding to nucleotide 1320 of the cMOAT gene, or a portion of SEQ ID NO:45. Alternatively, preferred portions are at least 10, preferably at least 20, preferably at least 40, preferably at least 100, contiguous polynucleotides and comprise a “C” at the nucleotide position corresponding to nucleotide 1320 of the cMOAT gene, or a portion of SEQ ID NO:45. The invention further relates to isolated gene products, e.g., polypeptides and/or proteins, which are encoded by a nucleic acid molecule comprising all or a portion of the variant allele of the cMOAT gene.

[0285] In one embodiment, the invention relates to a method for predicting the likelihood that an individual will have a disorder associated with a “T” at the nucleotide position corresponding to nucleotide position 1320 of SEQ ID NO:45 (or diagnosing or aiding in the diagnosis of such a disorder) comprising the steps of obtaining a DNA sample from an individual to be assessed and determining the nucleotide present at position 1320 of SEQ ID NO:45. The presence of a “T” at this position indicates that the individual has a greater likelihood of having a disorder associated therewith than an individual having a “C” at that position, or a greater likelihood of having more severe symptoms.

[0286] Conversely, the invention relates to a method for predicting the likelihood that an individual will have a disorder associated with a “C” at the nucleotide position corresponding to nucleotide position 1320 of SEQ ID NO:45 (or diagnosing or aiding in the diagnosis of such a disorder) comprising the steps of obtaining a DNA sample from an individual to be assessed and determining the nucleotide present at position 1320 of SEQ ID NO:45. The presence of a “C” at this position indicates that the individual has a greater likelihood of having a disorder associated therewith than an individual having a “T” at that position, or a greater likelihood of having more severe symptoms.

[0287] The present invention further relates to isolated proteins or polypeptides comprising, or alternatively, consisting of all or a portion of the encoded variant amino acid sequence of the human human cMOAT, solute carrier family 21 member 6 polypeptide (e.g., wherein reference or wildtype human cMOAT, solute carrier family 21 member 6 polypeptide is exemplified by SEQ ID NO:2). Preferred portions are at least 10, preferably at least 20, preferably at least 40, preferably at least 100, contiguous polypeptides and comprises a “K” at the amino acid position corresponding to amino acid 407 of the cMOAT polypeptide, or a portion of SEQ ID NO:46. Alternatively, preferred portions are at least 10, preferably at least 20, preferably at least 40, preferably at least 100, contiguous polypeptides and comprises a “L” at the amino acid position corresponding to amino acid 407 of the cMOAT protein, or a portion of SEQ ID NO:46. The invention further relates to isolated nucleic acid molecules encoding such polypeptides or proteins, as well as to antibodies that bind to such proteins or polypeptides.

[0288] Representative disorders which may be detected, diagnosed, identified, treated, prevented, and/or ameliorated by the present invention include, the following, non-limiting diseases and disorders: decreased heptic uptake of administered statins, resistance to beneficial responses of administered statins; resistance to LDL lowering responses to administered statins; resistance to TG lowering responses to administered statins; resistance to HDL elevating responses to administered statins; increased incidence of drug interactions between one or more administered statins; increased incidence of drug and endogenous substance interactions between a statin drug and endogenous substrates of cMOAT including cholate, taurocholate, thyroid hormones T3 and T4, DHEAS, estradiol-17beta-glucuronide, estrone-3-sulfate, prostaglandin E2, thromboxane B2, leukotriene C4, leukotriene E4, and bilirubin and its conjugates; decreased response to HMG-CoA reductase inhibitors; in addition to other disorders referenced herein, which include, for example, any disorder related to high levels of circulating LDL, high levels of TG, and/or low levels of circularing HDL, which include, but are not limited to, cardiovascular diseases, hepatic diseases, angina pectoris, hypertension, heart failure, myocardial infarction, ventricular hypertrophy, vascular diseases, miscrovascular disease, vascular leak syndrome, aneurysm, stroke, embolism, thrombosis, endothelial dysfunction, coronary artery disease, arteriosclerosis, and/or atherosclerosis.

[0289] In preferred embodiments, the following N-terminal cMOAT (SNP_ID:PS101s24) deletion polypeptides are encompassed by the present invention: M1-F1545, L2-F1545, E3-F1545, K4-F1545, F5-F1545, C6-F1545, N7-F1545, S8-F1545, T9-F1545, F10-F1545, W11-F1545, N12-F1545, S13-F1545, S14-F1545, F15-F1545, L16-F1545, D17-F1545, S18-F1545, P19-F1545, E20-F1545, A21-F1545, D22-F1545, L23-F1545, P24-F1545, L25-F1545, C26-F1545, F27-F1545, E28-F1545, Q29-F1545, T30-F1545, V31-F1545, L32-F1545, V33-F1545, W34-F1545, I35-F1545, P36-F1545, L37-F1545, G38-F1545, F39-F1545, L40-F1545, W41-F1545, L42-F1545, L43-F1545, A44-F1545, P45-F1545, W46-F1545, Q47-F1545, L48-F1545, L49-F1545, H50-F1545, V51-F1545, Y52-F1545, K53-F1545, S54-F1545, R55-F1545, T56-F1545, K57-F1545, R58-F1545, S59-F1545, S60-F1545, T61-F1545, T62-F1545, K63-F1545, L64-F1545, Y65-F1545, L66-F1545, A67-F1545, K68-F1545, Q69-F1545, V70-F1545, F71-F1545, V72-F1545, G73-F1545, F74-F1545, L75-F1545, L76-F1545, I77-F1545, L78-F1545, A79-F1545, A80-F1545, I81-F.545, E82-F1545, L83-F1545, A84-F1545, L85-F1545, V86-F1545, L87-F1545, T88-F1545, E89-F1545, D90-F1545, S91-F1545, G92-F1545, Q93-F1545, A94-F1545, T95-F1545, V96-F1545, P97-F1545, A98-F1545, V99-F1545, R100-F1545, Y10-F1545, T102-F1545, N103-F1545, P104-F1545, S105-F1545, L106-F1545, Y107-F1545, L108-F1545, G109-F1545, T110-F1545, W111-F1545, L112-F1545, L113-F1545, V114-F1545, L115-F1545, L116-F1545, I117-F1545, Q118-F1545, Y119-F1545, S120-F1545, R121-F1545, Q122-F1545, W123-F1545, C124-F1545, V125-F1545, Q126-F1545, K127-F1545, N128-F1545, S129-F1545, W130-F1545, F131-F1545, L132-F1545, S133-F1545, L134-F1545, F135-F1545, W136-F1545, I137-F1545, L138-F1545, S139-F1545, I140-F1545, L141-F1545, C142-F1545, G143-F1545, T144-F1545, F145-F1545, Q146-F1545, F147-F1545, Q148-F1545, T149-F1545, L150-F1545, I151-F1545, R152-F1545, T153-F1545, L154-F1545, L155-F1545, Q156-F1545, G157-F1545, D158-F1545, N159-F1545, S160-F1545, N161-F1545, L162-F1545, A163-F1545, Y164-F1545, S165-F1545, C166-F1545, L167-F1545, F168-F1545, F169-F1545, I170-F1545, S171-F1545, Y172-F1545, G173-F1545, F174-F1545, Q175-F1545, I176-F1545, L177-F1545, I178-F1545, L179-F1545, I180-F1545, F181-F1545, S182-F1545, A183-F1545, F184-F1545, S185-F1545, E186-F1545, N187-F1545, N188-F1545, E189-F1545, S196-F1545, I197-F1545, A198-F1545, S199-F1545, F200-F1545, L201-F1545, S202-F1545, S203-F1545, I204-F1545, T205-F1545, Y206-F1545, S207-F1545, W208-F1545, Y209-F1545, D210-F1545, S211-F1545, I212-F1545, I213-F1545, L214-F1545, K215-F1545, G216-F1545, Y217-F1545, K218-F1545, R219-F1545, P220-F1545, L221-F1545, T222-F1545, L223-F1545, E224-F1545, D225-F1545, V226-F1545, W227-F1545, E228-F1545, V229-F1545, D230-F1545, E231-F1545, E232-F1545, M233-F1545, K234-F1545, T235-F1545, K236-F1545, T237-F1545, L238-F1545, V239-F1545, S240-F1545, K241-F1545, F242-F1545, E243-F1545, T244-F1545, H245-F1545, M246-F1545, K247-F1545, R248-F1545, E249-F1545, L250-F1545, Q251-F1545, K252-F1545, A253-F1545, R254-F1545, R255-F1545, A256-F1545, L257-F1545, Q258-F1545, R259-F1545, R260-F1545, Q261-F1545, E262-F1545, K263-F1545, S264-F1545, S265-F1545, Q266-F1545, Q267-F1545, N268-F1545, S269-F1545, G270-F1545, A271-F1545, R272-F1545, L273-F1545, P274-F1545, G275-F1545, L276-F1545, N277-F1545, K278-F1545, N279-F1545, Q280-F1545, S281-F1545, Q282-F1545, S283-F1545, Q284-F1545, D285-F1545, A286-F1545, L287-F1545, V288-F1545, L289-F1545, E290-F1545, D291-F1545, V292-F1545, E293-F1545, K294-F1545, K295-F1545, K296-F1545, K297-F1545, K298-F1545, S299-F1545, G300-F1545, T301-F1545, K302-F1545, K303-F1545, D304-F1545, V305-F1545, P306-F1545, K307-F1545, S308-F1545, W309-F1545, L310-F1545, M311-F1545, K312-F1545, A313-F1545, L314-F1545, F315-F1545, K316-F1545, T317-F1545, F318-F1545, Y319-F1545, M320-F1545, V321-F1545, L322-F1545, L323-F1545, K324-F1545, S325-F1545, F326-F1545, L327-F1545, L328-F1545, K329-F1545, L330-F1545, V331-F1545, N332-F1545, D333-F1545, I334-F1545, F335-F1545, T336-F1545, F337-F1545, V338-F1545, S339-F1545, P340-F1545, Q341-F1545, L342-F1545, L343-F1545, K344-F1545, L345-F1545, L346-F1545, I347-F1545, S348-F1545, F349-F1545, A350-F1545, S351-F1545, D352-F1545, R353-F1545, D354-F1545, T355-F1545, Y356-F1545, L357-F1545, W358-F1545, I359-F1545, G360-F1545, Y361-F1545, L362-F1545, C363-F1545, A370-F1545, A371-F1545, L372-F1545, I373-F1545, Q374-F1545, S375-F1545, F376-F1545, C377-F1545, L378-F1545, Q379-F1545, C380-F1545, Y381-F1545, F382-F1545, Q383-F1545, L384-F1545, C385-F1545, F386-F1545, K387-F1545, L388-F1545, G389-F1545, V390-F1545, K391-F1545, V392-F1545, R393-F1545, T394-F1545, A395-F1545, I396-F1545, M397-F1545, A398-F1545, S399-F1545, V400-F1545, Y401-F1545, K402-F1545, K403-F1545, A404-F1545, L405-F1545, T406-F1545, and/or K407-F1545 of SEQ ID NO:46. Polynucleotide sequences encoding these polypeptides are also provided. The present invention also encompasses the use of these N-terminal cMOAT (SNP_ID:PS101s24) deletion polypeptides as immunogenic and/or antigenic epitopes as described elsewhere herein.

[0290] In preferred embodiments, the following C-terminal cMOAT (SNP_ID:PS101s24) deletion polypeptides are encompassed by the present invention: M1-F1545, M1-K1544, M1-T1543, M1-S1542, M1-N1541, M1-V1540, M1-N1539, M1-E1538, M1-I1537, M1-G1536, M1-A1535, M1-E1534, M1-K1533, M1-A1532, M1-M1531, M1-F1530, M1-Y1529, M1-F1528, M1-P1527, M1-G1526, M1-P1525, M1-I1524, M1-Q1523, M1-L1522, M1-L1521, M1-E1520, M1-E1519, M1-P1518, M1-S1517, M1-G1516, M1-Y1515, M1-E1514, M1-I1513, M1-I1512, M1-K1511, M1-G1510, M1-N1509, M1-D1508, M1-L1507, M1-V1506, M1-M1505, M1-V1504, M1-K1503, M1-D1502, M1-S1501, M1-D1500, M1-M1499, M1-I1498, M1-T1497, M1-H1496, M1-L1495, M1-R1494, M1-H1493, M1-A1492, M1-I1491, M1-T1490, M1-I1489, M1-V1488, M1-T1487, M1-C1486, M1-H1485, M1-A1484, M1-F1483, M1-E1482, M1-N1481, M1-Q1480, M1-I1479, M1-T1478, M1-T1477, M1-Q1476, M1-I1475, M1-L1474, M1-N1473, M1-D1472, M1-T1471, M1-E1470, M1-L1469, M1-D1468, M1-V1467, M1-A1466, M1-A1465, M1-T1464, M1-A1463, M1-E1462, M1-D1461, M1-L1460, M1-V1459, M1-L1458, M1-I1457, M1-K1456, M1-S1455, M1-K1454, M1-R1453, M1-L1452, M1-L1451, M1-A1450, M1-R1449, M1-G1448, M1-L1447, M1-C1446, M1-L1445, M1-L1444, M1-Q1443, M1-R1442, M1-Q1441, M1-G1440, M1-I1439, M1-S1438, M1-L1437, M1-N1436, M1-G1435, M1-G1434, M1-A1433, M1-E1432, M1-T1431, M1-V1430, M1-E1429, M1-H1428, M1-S1427, M1-L1426, M1-G1425, M1-L1424, M1-Q1423, M1-L1422, M1-S1421, M1-A1420, M1-V1419, M1-F1418, M1-S1417, M1-K1416, M1-L1415, M1-H1414, M1-A1413, M1-L1412, M1-E1411, M1-L1410, M1-A1409, M1-K1408, M1-W1407, M1-I1406, M1-E1405, M1-E1404, M1-D1403, M1-S1402, M1-Y1401, M1-N1400, M1-N1399, M1-F1398, M1-P1397, M1-D1396, M1-L1395, M1-N1394, M1-M1393, M1-R1392, M1-L1391, M1-S1390, M1-G1389, M1-S1388, M1-F1387, M1-L1386, M1-I1385, M1-P1384, M1-D1383, M1-Q1382, M1-P1381, M1-I1380, M1-I1379, M1-T1378, M1-L1377, M1-K1376, M1-E1375, M1-R1374, M1-L1373, M1-D1372, M1-H1371, M1-L1370, M1-G1369, M1-I1368, M1-S1367, M1-A1366, M1-I1365, M1-D1364, M1-V1363, M1-G1362, M1-D1361, M1-I1360, M1-I1359, M1-I1358, M1-Q1357, M1-G1356, M1-G1355, M1-A1354, M1-A1353, M1-E1352, M1-L1351, M1-I1350, M1-R1349, M1-F1348, M1-L1347, M1-C1346, M1-N1345, M1-T1344, M1-L1343, M1-S1342, M1-S1341, M1-K1340, M1-G1339, M1-A1338, M1-G1337, M1-T1336, M1-R1335, M1-G1334, M1-V1333, M1-V1332, M1-G1331, M1-I1330, M1-K1329, M1-E1328, M1-M1327, M1-S1326, M1-G1325, M1-I1324, M1-D1323, M1-C1322, M1-T1321, M1-I1320, M1-G1319, M1-R1318, M1-L1317, M1-V1316, M1-L1315, M1-D1314, M1-L1313, M1-E1312, M1-P1311, M1-R1310, M1-Y1309, M1-R1308, M1-V1307, M1-Q1306, M1-Y1305, M1-N1304, M1-N1303, M1-F1302, M1-Q1301, M1-I1300, M1-K1299, M1-G1298, M1-K1297, M1-S1296, M1-P1295, M1-W1294, M1-D1293, M1-P1292, M1-P1291, M1-P1290, M1-R1289, M1-K1288, M1-D1287, M1-T1286, M1-V1285, M1-W1284, M1-P1283, M1-A1282, M1-E1281, M1-N1280, M1-E1279, M1-V1278, M1-K1277, M1-T1276, M1-Y1275, M1-E1274, M1-T1273, M1-I1272, M1-R1271, M1-E1270, M1-V1269, M1-A1268, M1-V1267, M1-I1266, M1-N1265, M1-T1264, M1-E1263, M1-I1262, M1-E1261, M1-S1260, M1-T1259, M1-M1258, M1-R1257, M1-V1256, M1-L1255, M1-W1254, M1-N1253, M1-L1252, M1-T1251, M1-Q1250, M1-T1249, M1-I1248, M1-N1247, M1-L1246, M1-A1245, M1-N1244, M1-S1243, M1-L1242, M1-V1241, M1-F1240, M1-G1239, M1-V1238, M1-T1237, M1-D1236, M1-G1235, M1-S1234, M1-L1233, M1-T1232, M1-D1231, M1-R1230, M1-Y1229, M1-I1228, M1-V1227, M1-M1226, M1-M1225, M1-L1224, M1-A1223, M1-S1222, M1-F1221, M1-F1220, M1-V1219, M1-T1218, M1-L1217, M1-N1216, M1-G1215, M1-V1214, M1-L1213, M1-E1212, M1-L1211, M1-R1210, M1-I1209, M1-A1208, M1-L1207, M1-W1206, M1-R1205, M1-N1204, M1-S1203, M1-T1202, M1-I1201, M1-W1200, M1-S1199, M1-F1198, M1-V1197, M1-C1196, M1-K1195, M1-Q1194, M1-N1193, M1-T1192, M1-D1191, M1-I1190, M1-R1189, M1-E1188, M1-E1187, M1-N1186, M1-H1185, M1-K1184, M1-L1183, M1-F1182, M1-R1181, M1-Q1180, M1-Q1179, M1-H1178, M1-E1177, M1-F1176, M1-A1175, M1-R1174, M1-I1173, M1-V1172, M1-P1171, M1-L1170, M1-G1169, M1-S1168, M1-V1167, M1-T1166, M1-E1165, M1-S1164, M1-F1163, M1-H1162, M1-S1161, M1-Y1160, M1-I1159, M1-P1158, M1-S1157, M1-R1156, M1-T1155, M1-V1154, M1-S1153, M1-D1152, M1-L1151, M1-R1150, M1-R1149, M1-L1148, M1-Q1147, M1-R1146, M1-S1145, M1-T1144, M1-S1143, M1-V1142, M1-Y1141, M1-F1140, M1-M1139, M1-Q1138, M1-V1137, M1-S1136, M1-V1135, M1-Y1134, M1-I1133, M1-I1132, M1-G1131, M1-L1130, M1-P1129, M1-I1128, M1-V1127, M1-I1126, M1-I1125, M1-T1124, M1-F1123, M1-V1122, M1-P1121, M1-T1120, M1-A1119, M1-M1118, M1-C1117, M1-I1116, M1-M1115, M1-V1114, M1-L1113, M1-T1112, M1-S1111, M1-I1110, M1-I1109, M1-G1108, M1-L1107, M1-F1106, M1-C1105, M1-T1104, M1-I1103, M1-W1102, M1-S1101, M1-R1110, M1-L1099, M1-S1098, M1-Q1097, M1-P1096, M1-L1095, M1-T1094, M1-D1093, M1-D1092, M1-V1091, M1-T1090, M1-S1089, M1-I1088, M1-D1087, M1-G1086, M1-A1085, M1-F1084, M1-R1083, M1-N1082, M1-V1081, M1-I1080, M1-R1079, M1-G1078, M1-T1077, M1-P1076, M1-T1075, M1-T1074, M1-D1073, M1-F1072, M1-F1071, M1-R1070, M1-M1069, M1-P1068, M1-A1067, M1-R1066, M1-L1065, M1-I1064, M1-N1063, M1-N1062, M1-L1061, M1-L1060, M1-Q1059, M1-K1058, M1-H1057, M1-L1056, M1-I1055, M1-N1054, M1-S1053, M1-A1052, M1-H1051, M1-V1050, M1-F1049, M1-G1048, M1-F1047, M1-A1046, M1-S1045, M1-W1044, M1-F1043, M1-H1042, M1-A1041, M1-I1040, M1-F1039, M1-V1038, M1-F1037, M1-I1036, M1-G1035, M1-Q1034, M1-A1033, M1-L1032, M1-G1031, M1-L1030, M1-A1029, M1-G1028, M1-Y1027, M1-V1026, M1-G1025, M1-V1024, M1-R1023, M1-M1022, M1-D1021, M1-R1020, M1-Q1019, M1-S1018, M1-A1017, M1-P1016, M1-Y1015, M1-D1014, M1-T1013, M1-S1012, M1-N1011, M1-F1010, M1-I1009, M1-K1008, M1-S1007, M1-D1006, M1-S1005, M1-T1004, M1-W1003, M1-A1002, M1-S1001, M1-L1000, M1-W999, M1-L998, M1-N997, M1-S996, M1-G995, M1-I994, M1-F993, M1-A992, M1-V991, M1-S990, M1-N989, M1-M988, M1-V987, M1-F986, M1-A985, M1-A985, M1-L984, M1-I983, M1-I982, M1-F981, M1-F980, M1-I979, M1-S978-F977, M1-L976, M1-G975, M1-I974, M1-A973, M1-Q972, M1-L971, M1-Y970, M1-E969, M1-L968, M1-Y967, M1-I966, M1-S965, M1-F964, M1-K963, M1-V962, M1-K961, M1-G960, M1-T959, M1-E958, M1-I957, M1-F956, M1-E955, M1-K954, M1-K953, M1-I952, M1-L951, M1-K950, M1-Q949, M1-G948, M1-K947, M1-V946, M1-L945, M1-E944, M1-E943, M1-D942, M1-E941, M1-K940, M1-L939, M1-S938, M1-N937, M1-V936, M1-N935, M1-R934, M1-T933, M1-K932, M1-L931, M1-S930, M1-N929, M1-R928, M1-L927, M1-S926, M1-K925, M1-L924, M1-H923, M1-R922, M1-G921, M1-N920, M1-S919, M1-R918, M1-S917, M1-S916, M1-R915, M1-S914, M1-L913, M1-T912, M1-R911, M1-R910, M1-F909, M1-S908, M1-N907, M1-E906, M1-R905, M1-R904, M1-M903, M1-T902, M1-I901-S900, M1-A899, M1-A898, M1-D897, M1-E896, M1-P895, M1-I894, M1-E893, M892, M1-V891, M1-S890, M1-S889, M1-I888, M1-L887, M1-G886, M1-Y885, D884, M1-D883, M1-D882, M1-E881, M1-E880, M1-E879, M1-S878, M1-G877, M1-D876, M1-H875, M1-V874, M1-T873, M1-A872, M1-E871, M1-E870, M1-E869, M1-P868, M1-G867, M1-T866, M1-H865, M1-R864, M1-L863, M1-F862, M1-T861, M1-K860, M1-L859, M1-N858, M1-K857, M1-A856, M1-F855, M1-E854, M1-G853, M1-K852, M1-K851, M1-A850, M1-L849, M1-L848, M1-A847, M1-S846, M1-Y845, M1-S844, M1-G843, M1-K842, M1-E841, M1-V840, M1-I839, M1-T838, M1-G837, M1-N836, M1-G835, M1-L834, M1-V833, M1-V832, M1-I831, M1-E830, M1-D829, M1-V828, M1-Q827, M1-P826, M1-L825, M1-F824, M1-H823, M1-M822, M1-S821, M1-H820, M1-T819, M1-V818, M1-L817, M1-L816, M1-R815, M1-T814, M1-K813, M1-G812, M1-K811, M1-L810, M1-L809, M1-G808, M1-N807, M1-P806, M1-G805, M1-L804, M1-V803, M1-K802, M1-N801, M1-F800, M1-I799, M1-H798, M1-K797, M1-G796, M1-V795, M1-H794, M1-A793, M1-D792, M1-V791, M1-A790, M1-S789, M1-L788, M1-P787, M1-D786, M1-D785, M1-L784, M1-L783, M1-Y782, M1-I781, M1-D780, M1-L779, M1-N778, M1-Q777, M1-Y776, M1-T775, M1-A774, M1-R773, M1-A772, M1-L771, M1-S770, M1-I769, M1-R768, M1-Q767, M1-K766, M1-Q765, M1-G764, M1-G763, M1-S762, M1-L761, M1-N760, M1-I759, M1-G758, M1-K757, M1-E756, M1-G755, M1-I754, M1-E753, M1-A752, M1-L751, M1-D750, M1-G749, M1-G748, M1-P747, M1-L746, M1-M745, M1-E744, M1-L743, M1-D742, M1-P741, M1-L740, M1-L739, M1-A738, M1-C737, M1-A736, M1-E735, M1-L734, M1-V733, M1-Q732, M1-Q731, M1-Y730, M1-R729, M1-K728, M1-E727, M1-N726, M1-F725, M1-E724, M1-T723, M1-G722, M1-F721, M1-L720, M1-I719, M1-N718, M1-D717, M1-K716, M1-I715, M1-T714, M1-G713, M1-N712, M1-Q711, M1-I710, M1-W709, M1-S708, M1-Q707, M1-Q706, M1-P705, M1-V704, M1-Y703, M1-A702, M1-T701, M1-T700, M1-G699, M1-K698, M1-I697, M1-T696, M1-I695, M1-H694, M1-G693, M1-H692, M1-V691, M1-N690, M1-E689, M1-M688, M1-E687, M1-G686, M1-L685, M1-M684, M1-A683, M1-S682, M1-I681, M1-L680, M1-S679, M1-S678, M1-K677, M1-G676, M1-S675, M1-G674, M1-V673, M1-P672, M1-G671, M1-I670, M1-V669, M1-A668, M1-V667, M1-L666, M1-Q665, M1-G664, M1-A663, M1-M662, M1-I661, M1-D660, M1-L659, M1-N658, M1-V657, M1-D656, M1-R655, M1-V654, M1-T653, M1-A652, M1-E651, M1-S650, M1-D649, M1-H648, M1-E647, M1-W646, M1-T645, M1-F644, M1-S643, M1-A642, M1-E641, M1-S640, M1-F639, M1-Q638, M1-M637, M1-A636, M1-K635, M1-D634, M1-F633, M1-N632, M1-C631, M1-D630, M1-H629, M1-R628, M1-I627, M1-A626, M1-S625, M1-T624, M1-D623, M1-L622, M1-D621, M1-D620, M1-G619, M1-G618, M1-L617, M1-Y616, M1-K615, M1-E614, M1-L613, M1-R612, M1-E611, M1-T610, M1-S609, M1-V608, M1-S607, M1-A606, M1-Q605, M1-L604, M1-M603, M1-S602, M1-S601, M1-I600, M1-M599, M1-M598, M1-P597, M1-L596, M1-M595, M1-S594, M1-L593, M1-P592, M1-F591, M1-R590, M1-L589, M1-I588, M1-N587, M1-F586, M1-L585, M1-T584, M1-I583, M1-S582, M1-T581, M1-F580, M1-A579, M1-K578, M1-Q577, M1-A576, M1-D575, M1-L574, M1-I573, M1-N572, M1-N571, M1-S570, M1-D569, M1-V568, M1-L567, M1-V566, M1-Y565, M1-V564, M1-S563, M1-F562, M1-T561, M1-V560, M1-V559, M1-S558, M1-V557, M1-L556, M1-V555, M1-P554, M1-T553, M1-L552, M1-Q551, M1-F550, M1-V549, M1-F548, M1-I547, M 1 -V546, M1-V545, M1-C544, M1-Q543, M1-L542, M1-Q541, M1-S540, M1-F539, M1-A538, M1-L537, M1-L536, M1-N535, M1-K534, M1-L533, M1-E532, M1-K531, M1-K530, M1-R529, M1-L528, M1-N527, M1-Q526, M1-V525, M1-Q524, M1-D523, M1-R522, M1-F521, M1-S520, M1-P519, M1-E518, M1-W517, M1-A516, M1-F515, M1-Y514, M1-K513, M1-L512, M1-I511, M1-K510, M1-I509, M1-G508, M1-S507, M1-L506, M1-I505, M1-E504, M1-N503, M1-M502, M1-I501, M1-K500, M1-L499, M1-R498, M1-K497, M1-D496, M1-K495, M1-N494, M1-K493, M1-M492, M1-N491, M1-K490, M1-V489, M1-Q488, M1-I487, M1-T486, M1-K485, M1-S484, M1-K483, M1-T482, M1-S481, M1-L480, M1-I479, M1-A478, M1-N477, M1-I476, M1-P475, M1-I474, M1-V473, M1-L472, M1-V471, M1-M470, M1-V469, M1-G468, M1-V467, M1-G466, M1-A465, M1-L464, M1-V463, M1-S462, M1-P461, M1-G460, M1-L459, M1-E458, M1-R457, M1-W456, M1-L455, M1-F454, M1-F453, M1-I452, M1-S451, M1-LA450, M1-V449, M1-I448, M1-Q447, M1-L446, M1-V445, M1-S444, M1-S443, M1-W442, M1-L441, M1-M440, M1-H439, M1-M438, M1-F437, M1-N436, M1-T435, M1-V434, M1-D433, M1-M432, M1-L431, M1-K430, M1-Q429, M1-A428, M1-D427, M1-V426, M1-S425, M1-M424, M1-L423, M1-N422, M1-V421, M1-T420, M1-E419, M1-G418, M1-V417, M1-T416, M1-Y415, M1-E414, M1-K413, M1-R412, M1-A411, M1-L410, M1-N409, M1-S408, and/or M1-K407 of SEQ ID NO:46. Polynucleotide sequences encoding these polypeptides are also provided. The present invention also encompasses the use of these C-terminal cMOAT (SNP_ID:PS101s24) deletion polypeptides as immunogenic and/or antigenic epitopes as described elsewhere herein.

[0291] Alternatively, preferred polypeptides of the present invention may comprise polypeptide sequences corresponding to, for example, internal regions of the cMOAT (SNP_ID: PS101s24) polypeptide (e.g., any combination of both N- and C-terminal cMOAT (SNP_ID: PS101s24) polypeptide deletions) of SEQ ID NO:46. For example, internal regions could be defined by the equation: amino acid NX to amino acid CX, wherein NX refers to any N-terminal deletion polypeptide amino acid of cMOAT (SNP_ID: PS101s24) (SEQ ID NO:46), and where CX refers to any C-terminal deletion polypeptide amino acid of cMOAT (SNP_ID: PS101s24) (SEQ ID NO:46). Polynucleotides encoding these polypeptides are also provided. The present invention also encompasses the use of these polypeptides as an immunogenic and/or antigenic epitope as described elsewhere herein. Preferably, the resulting deletion polypeptide comprises the polypeptide polymorphic loci identified elsewhere herein for cMOAT (SNP_ID: PS101s24), and more preferably comprises the polypeptide polymorphic allele identified elsewhere herein for cMOAT (SNP_ID: PS101s24).

### Features of the Polypeptide Encoded by Gene No:22

[0292] The present invention relates to isolated nucleic acid molecules comprising, or alternatively, consisting of all or a portion of the variant allele of the human cMOAT, ATP-binding cassette sub-family C member 2 gene (SNP_ID: PS101s32) (e.g., wherein reference or wildtype cMOAT gene is exemplified by SEQ ID NO:1). Preferred portions are at least 10, preferably at least 20, preferably at least 40, preferably at least 100, contiguous polynucleotides and comprise an “A” at the nucleotide position corresponding to nucleotide 3035 of the cMOAT gene, or a portion of SEQ ID NO:47. Alternatively, preferred portions are at least 10, preferably at least 20, preferably at least 40, preferably at least 100, contiguous polynucleotides and comprise a “G” at the nucleotide position corresponding to nucleotide 3035 of the cMOAT gene, or a portion of SEQ ID NO:47. The invention further relates to isolated gene products, e.g., polypeptides and/or proteins, which are encoded by a nucleic acid molecule comprising all or a portion of the variant allele of the cMOAT gene.

[0293] In one embodiment, the invention relates to a method for predicting the likelihood that an individual will have a disorder associated with an “A” at the nucleotide position corresponding to nucleotide position 3035 of SEQ ID NO:47 (or diagnosing or aiding in the diagnosis of such a disorder) comprising the steps of obtaining a DNA sample from an individual to be assessed and determining the nucleotide present at position 3035 of SEQ ID NO:47. The presence of an “A” at this position indicates that the individual has a greater likelihood of having a disorder associated therewith than an individual having a “G” at that position, or a greater likelihood of having more severe symptoms.

[0294] Conversely, the invention relates to a method for predicting the likelihood that an individual will have a disorder associated with a “G” at the nucleotide position corresponding to nucleotide position 3035 of SEQ ID NO:47 (or diagnosing or aiding in the diagnosis of such a disorder) comprising the steps of obtaining a DNA sample from an individual to be assessed and determining the nucleotide present at position 3035 of SEQ ID NO:47. The presence of a “G” at this position indicates that the individual has a greater likelihood of having a disorder associated therewith than an individual having an “A” at that position, or a greater likelihood of having more severe symptoms.

[0295] Representative disorders which may be detected, diagnosed, identified, treated, prevented, and/or ameliorated by the present invention include, the following, non-limiting diseases and disorders: decreased heptic uptake of administered statins, resistance to beneficial responses of administered statins; resistance to LDL lowering responses to administered statins; resistance to TG lowering responses to administered statins; resistance to HDL elevating responses to administered statins; increased incidence of drug interactions between one or more administered statins; increased incidence of drug and endogenous substance interactions between a statin drug and endogenous substrates of cMOAT including cholate, taurocholate, thyroid hormones T3 and T4, DHEAS, estradiol-17beta-glucuronide, estrone-3-sulfate, prostaglandin E2, thromboxane B2, leukotriene C4, leukotriene E4, and bilirubin and its conjugates; decreased response to HMG-CoA reductase inhibitors; in addition to other disorders referenced herein, which include, for example, any disorder related to high levels of circulating LDL, high levels of TG, and/or low levels of circularing HDL, which include, but are not limited to, cardiovascular diseases, hepatic diseases, angina pectoris, hypertension, heart failure, myocardial infarction, ventricular hypertrophy, vascular diseases, miscrovascular disease, vascular leak syndrome, aneurysm, stroke, embolism, thrombosis, endothelial dysfunction, coronary artery disease, arteriosclerosis, and/or atherosclerosis.

TABLE I

| | | | | NT | Total | | | AA | |
|---|---|---|---|---|---|---|---|---|---|
| | | | | SEQ | NT | 5′ NT | | Seq | Total |
| | CDNA | NT | AA | ID. | Seq | of Start | 3′ NT | ID | AA |
| Gene | Name/ | Poly- | Poly- | No. | of | Codon | of | No. | of |
| No. | SNP_ID | morphism | morphism | X | Clone | of ORF | of ORF | Y | ORF |
| 1. | OATP2/ | G545A | N/A | 5 | 2830 | 135 | 2210 | 6 | 691 |
| | PS100s1 | | | | | | | | |
| 2. | OATP2/ | C597A | P155T | 7 | 2830 | 135 | 2210 | 8 | 691 |
| | PS100s2 | | | | | | | | |
| 3. | OATP2/ | G522T | D130Y | 9 | 2830 | 135 | 2210 | 10 | 691 |
| | PS100s9 | | | | | | | | |
| 4. | OATP2/ | G1597C | G488A | 11 | 2830 | 135 | 2210 | 12 | 691 |
| | PS100s23 | | | | | | | | |
| 5. | OATP2/ | G1382A | N/A | 13 | 2830 | 135 | 2210 | 14 | 691 |
| | PS100s25 | | | | | | | | |
| 6. | OATP2/ | C1334G | F400K | 15 | 2830 | 135 | 2210 | 16 | 691 |
| | PS100s26 | | | | | | | | |
| 7. | OATP2/ | T655C | V174A | 17 | 2830 | 135 | 2210 | 18 | 691 |
| | PS100s29 | | | | | | | | |
| 8. | OATP2/ | T705C | K191L | 19 | 2830 | 135 | 2210 | 20 | 691 |
| | PS100s30 | | | | | | | | |
| 9. | OATP2/ | C731T | N/A | 21 | 2830 | 135 | 2210 | 22 | 691 |
| | PS100s31 | | | | | | | | |
| 10. | CMOAT/ | A3664T | E1188V | 23 | 5300 | 102 | 4739 | 24 | 1545 |
| | PS101s1 | | | | | | | | |
| 11. | CMOAT/ | C4073T | N/A | 25 | 5300 | 102 | 4739 | 26 | 1545 |
| | PS101s2 | | | | | | | | |
| 12. | CMOAT/ | C4211T | N/A | 27 | 5300 | 102 | 4739 | 28 | 1545 |
| | PS101s4 | | | | | | | | |
| 13. | CMOAT/ | C4163T | N/A | 29 | 5300 | 102 | 4739 | 30 | 1545 |
| | PS101s5 | | | | | | | | |
| 14. | CMOAT/ | G4511A | N/A | 31 | 5300 | 102 | 4739 | 32 | 1545 |
| | PS101s6 | | | | | | | | |
| 15. | CMOAT/ | T4589C | N/A | 33 | 5300 | 102 | 4739 | 34 | 1545 |
| | PS101s7 | | | | | | | | |
| 16. | CMOAT/ | G3643T | R1181L | 35 | 5300 | 102 | 4739 | 36 | 1545 |
| | PS101s10 | | | | | | | | |
| 17. | CMOAT/ | A2983G | K961R | 37 | 5300 | 102 | 4739 | 38 | 1545 |
| | PS101S11 | | | | | | | | |
| 18. | CMOAT/ | A359G | N/A | 39 | 5300 | 102 | 4739 | 40 | 1545 |
| | PS101s13 | | | | | | | | |
| 19. | CMOAT/ | T2110C | 1670T | 41 | 5300 | 102 | 4739 | 42 | 1545 |
| | PS101s22 | | | | | | | | |
| 20. | CMOAT/ | G1350A | V4171 | 43 | 5300 | 102 | 4739 | 44 | 1545 |
| | PS101s23 | | | | | | | | |
| 21. | CMOAT/ | C1320T | L407K | 45 | 5300 | 102 | 4739 | 46 | 1545 |
| | PS101s24 | | | | | | | | |
| 22. | CMOAT/ | G3035A | N/A | 47 | 5300 | 102 | 4739 | 48 | 1545 |
| | PS101s32 | | | | | | | | |

[0296] Table I summarizes the information corresponding to each “Gene No.” described above. The nucleotide sequence identified as “NT SEQ ID NO:X” refers to the complete cDNA of the nucleotide comprising at least one polymorphism of the present invention and was identified using the methods described elsewhere herein, resulting in a final sequence identified as SEQ ID NO:X.

[0297] “cDNA Name/SNP_ID” refers to the accepted name of the wild type gene according to the HUGO Gene Nomenclature Committee, while the “SNP_ID” identifies the novel polymorphism provided as described in Tables IV, V, and VI, and the Examples herein. The SNP_ID uniquely identifies the novel SNPs of the present invention, and likewise the novel polynucleotide and polypeptides of the present invention which comprise these SNPs. The inclusion of the cDNA Name is provided for reference.

[0298] “NT Polymorphism” describes the specific nucleotide location within the coding region of each polynucleotide sequence of the present invention, in addition to the reference and variable nucleotides at that position. The format of this designation is as follows: R—N-A, where “N” refers to the nucleotide position of the polymorphism as shown in the Sequence Listing and/or Figures herein, the nucleotide provided in the “R” position refers to the reference nucleotide at the “N” position, while the nucleotide provided in the “A” position refers to the variable nucleotide at the “N” position.

[0299] “AA Polymorphism” describes the specific amino acid location within the encoded polypeptide sequence of the present invention, in addition to the reference and variable amino acids at that position. The format of this designation is as follows: R—N-A, where “N” refers to the amino acid position of the encoded polymorphism as shown in the Sequence Listing and/or Figures herein, the amino acid provided in the “R” position refers to the reference amino acid at the “N” position, while the amino acid provided in the “A” position refers to the variable amino acid at the “N” position.

[0300] “Total NT Seq. Of Clone” refers to the total number of nucleotides in the clone identified by “Gene No.” The nucleotide position of SEQ ID NO:X of the putative start codon (methionine) is identified as “5+ NT of Start Codon of ORF.”

[0301] The translated amino acid sequence, beginning with the methionine, is identified as “AA SEQ ID NO:Y” although other reading frames can also be easily translated using known molecular biology techniques. The polypeptides produced by these alternative open reading frames are specifically contemplated by the present invention.

[0302] The total number of amino acids within the open reading frame of SEQ ID NO:6, 8, 10, 12, 14, 16, 18, 20, 22, 24, 26, 28, 30, 32, 34, 36, 38, 40, 42, 44, 46, 48, 50, and/or 604 is identified as “Total AA of ORF”.

[0303] SEQ ID NO:X (where X may be any of the polynucleotide sequences disclosed in the sequence listing) and the translated SEQ ID NO:Y (where Y may be any of the polypeptide sequences disclosed in the sequence listing) are sufficiently accurate and otherwise suitable for a variety of uses well known in the art and described further herein. For instance, SEQ ID NO:5, 7, 9, 11, 13, 15, 17, 19, 21, 23, 25, 27, 29, 31, 33, 35, 37, 39, 41, 43, 45, 47, 49, and/or 603 is useful for designing nucleic acid hybridization probes that will detect nucleic acid sequences contained in SEQ ID NO:5, 7, 9, 11, 13, 15, 17, 19, 21, 23, 25, 27, 29, 31, 33, 35, 37, 39, 41, 43, 45, 47, 49, and/or 603. These probes will also hybridize to nucleic acid molecules in biological samples, thereby enabling a variety of forensic and diagnostic methods of the invention. Similarly, polypeptides identified from SEQ ID NO:6, 8, 10, 12, 14, 16, 18, 20, 22, 24, 26, 28, 30, 32, 34, 36, 38, 40, 42, 44, 46, 48, 50, and/or 604 may be used, for example, to generate antibodies which bind specifically to proteins containing the polypeptides and the proteins encoded by the cDNA clones identified in Table I.

[0304] Nevertheless, DNA sequences generated by sequencing reactions can contain sequencing errors. The errors exist as misidentified nucleotides, or as insertions or deletions of nucleotides in the generated DNA sequence. The erroneously inserted or deleted nucleotides may cause frame shifts in the reading frames of the predicted amino acid sequence. In these cases, the predicted amino acid sequence diverges from the actual amino acid sequence, even though the generated DNA sequence may be greater than 99.9% identical to the actual DNA sequence (for example, one base insertion or deletion in an open reading frame of over 1000 bases).

[0305] Accordingly, for those applications requiring precision in the nucleotide sequence or the amino acid sequence, the present invention provides the generated nucleotide sequence identified as SEQ ID NO:5, 7, 9, 11, 13, 15, 17, 19, 21, 23, 25, 27, 29, 31, 33, 35, 37, 39, 41, 43, 45, 47, 49, and/or 603 and the predicted translated amino acid sequence identified as SEQ ID NO:6, 8, 10, 12, 14, 16, 18, 20, 22, 24, 26, 28, 30, 32, 34, 36, 38, 40, 42, 44, 46, 48, 50, and/or 604, as set forth in Table I. Moreover, the amino acid sequence of the protein encoded by a particular clone can also be directly determined by peptide sequencing or by collecting the protein, and determining its sequence.

[0306] The present invention also relates to the genes corresponding to SEQ ID NO:5, 7, 9, 11, 13, 15, 17, 19, 21, 23, 25, 27, 29, 31, 33, 35, 37, 39, 41, 43, 45, 47, 49, and/or 603, SEQ ID NO:6, 8, 10, 12, 14, 16, 18, 20, 22, 24, 26, 28, 30, 32, 34, 36, 38, 40, 42, 44, 46, 48, 50, and/or 604. The corresponding gene can be isolated in accordance with known methods using the sequence information disclosed herein. Such methods include preparing probes or primers from the disclosed sequence and identifying or amplifying the corresponding gene from appropriate sources of genomic material.

[0307] Also provided in the present invention are species homologs, allelic variants, and/or orthologs. The skilled artisan could, using procedures well-known in the art, obtain the polynucleotide sequence corresponding to full-length genes (including, but not limited to the full-length coding region), allelic variants, splice variants, orthologs, and/or species homologues of genes corresponding to SEQ ID NO:5, 7, 9, 11, 13, 15, 17, 19, 21, 23, 25, 27, 29, 31, 33, 35, 37, 39, 41, 43, 45, 47, 49, and/or 603, SEQ ID NO:6, 8, 10, 12, 14, 16, 18, 20, 22, 24, 26, 28, 30, 32, 34, 36, 38, 40, 42, 44, 46, 48, 50, and/or 604. For example, allelic variants and/or species homologues may be isolated and identified by making suitable probes or primers which correspond to the 5′, 3′, or internal regions of the sequences provided herein and screening a suitable nucleic acid source for allelic variants and/or the desired homologue.

[0308] The polypeptides of the invention can be prepared in any suitable manner. Such polypeptides include isolated naturally occurring polypeptides, recombinantly produced polypeptides, synthetically produced polypeptides, or polypeptides produced by a combination of these methods. Means for preparing such polypeptides are well understood in the art.

[0309] The polypeptides may be in the form of the protein, or may be a part of a larger protein, such as a fusion protein (see below). It is often advantageous to include an additional amino acid sequence which contains secretory or leader sequences, pro-sequences, sequences which aid in purification, such as multiple histidine residues, or an additional sequence for stability during recombinant production.

[0310] The polypeptides of the present invention are preferably provided in an isolated form, and preferably are substantially purified. A recombinantly produced version of a polypeptide, can be substantially purified using techniques described herein or otherwise known in the art, such as, for example, by the one-step method described in Smith and Johnson, Gene 67:31-40 (1988). Polypeptides of the invention also can be purified from natural, synthetic or recombinant sources using protocols described herein or otherwise known in the art, such as, for example, antibodies of the invention raised against the full-length form of the protein.

[0311] The present invention provides a polynucleotide comprising, or alternatively consisting of, the sequence identified as SEQ ID NO:5, 7, 9, 11, 13, 15, 17, 19, 21, 23, 25, 27, 29, 31, 33, 35, 37, 39, 41, 43, 45, 47, 49, and/or 603. The present invention also provides a polypeptide comprising, or alternatively consisting of, the sequence identified as SEQ ID NO:6, 8, 10, 12, 14, 16, 18, 20, 22, 24, 26, 28, 30, 32, 34, 36, 38, 40, 42, 44, 46, 48, 50, and/or 604. The present invention also provides polynucleotides encoding a polypeptide comprising, or alternatively consisting of the polypeptide sequence of SEQ ID NO:6, 8, 10, 12, 14, 16, 18, 20, 22, 24, 26, 28, 30, 32, 34, 36, 38, 40, 42, 44, 46, 48, 50, and/or 604.

[0312] Preferably, the present invention is directed to a polynucleotide comprising, or alternatively consisting of, the sequence identified as SEQ ID NO:5, 7, 9, 11, 13, 15, 17, 19, 21, 23, 25, 27, 29, 31, 33, 35, 37, 39, 41, 43, 45, 47, 49, and/or 603, that is less than, or equal to, a polynucleotide sequence that is 5 mega basepairs, 1 mega basepairs, 0.5 mega basepairs, 0.1 mega basepairs, 50,000 basepairs, 20,000 basepairs, or 10,000 basepairs in length.

[0313] The present invention encompasses polynucleotides with sequences complementary to those of the polynucleotides of the present invention disclosed herein. Such sequences may be complementary to the sequence disclosed as SEQ ID NO:5, 7,9, 11, 13, 15, 17, 19, 21, 23, 25, 27, 29, 31, 33, 35, 37, 39, 41, 43, 45, 47, 49, and/or 603, and/or the nucleic acid sequence encoding the sequence disclosed as SEQ ID NO:6, 8, 10, 12, 14, 16, 18, 20, 22, 24, 26, 28, 30, 32, 34, 36, 38, 40, 42, 44, 46, 48, 50, and/or 604.

[0314] The present invention also encompasses polynucleotides capable of hybridizing, preferably under reduced stringency conditions, more preferably under stringent conditions, and most preferably under highly stringent conditions, to polynucleotides described herein. Examples of stringency conditions are shown in Table II below: highly stringent conditions are those that are at least as stringent as, for example, conditions A-F; stringent conditions are at least as stringent as, for example, conditions G-L; and reduced stringency conditions are at least as stringent as, for example, conditions M-R.

TABLE II

| | | | Hybridization | Wash |
|---|---|---|---|---|
| | Polynucleotide | Hybrid | Temperature | Temperature |
| Stringency Condition | Hybrid± | Length (bp)‡ | and Buffer† | and Buffer† |
| A | DNA:DNA | > or equal to | 65° C.; 1 × SSC - | 65° C.; |
| | | 50 | or- 42° C.; | 0.3 × SSC |
| | | | 1 × SSC, 50% | |
| | | | formamide | |
| B | DNA:DNA | <50 | Tb*; 1 × SSC | Tb*; 1 × SSC |
| C | DNA:RNA | > or equal to | 67° C.; 1 × SSC - | 67° C.; |
| | | 50 | or- 45° C.; | 0.3 × SSC |
| | | | 1 × SSC, 50% | |
| | | | formamide | |
| D | DNA:RNA | <50 | Td*; 1 × SSC | Td*; 1 × SSC |
| E | RNA:RNA | > or equal to | 70° C.; 1 × SSC - | 70° C.; |
| | | 50 | or- 50° C.; | 0.3 × SSC |
| | | | 1 × SSC, 50% | |
| | | | formamide | |
| F | RNA:RNA | <50 | Tf*; 1 × SSC | Tf*; 1 × SSC |
| G | DNA:DNA | > or equal to | 65° C.; 4 × SSC - | 65° C.; 1 × SSC |
| | | 50 | or- 45° C.; | |
| | | | 4 × SSC, 50% | |
| | | | formamide | |
| H | DNA:DNA | <50 | Th*; 4 × SSC | Th*; 4 × SSC |
| I | DNA:RNA | > or equal to | 67° C.; 4 × SSC - | 67° C.; 1 × SSC |
| | | 50 | or- 45° C.; | |
| | | | 4 × SSC, 50% | |
| | | | formamide | |
| J | DNA:RNA | <50 | Tj*; 4 × SSC | Tj*; 4 × SSC |
| K | RNA:RNA | > or equal to | 70° C.; 4 × SSC - | 67° C.; 1 × SSC |
| | | 50 | or- 40° C.; | |
| | | | 6 × SSC, 50% | |
| | | | formamide | |
| L | RNA:RNA | <50 | Tl*; 2 × SSC | Tl*; 2 × SSC |
| M | DNA:DNA | > or equal to | 50° C.; 4 × SSC - | 50° C.; 2 × SSC |
| | | 50 | or- 40° C. | |
| | | | 6 × SSC, 50% | |
| | | | formamide | |
| N | DNA:DNA | <50 | Tn*; 6 × SSC | Tn*; 6 × SSC |
| O | DNA:RNA | > or equal to | 55° C.; 4 × SSC - | 55° C.; 2 × SSC |
| | | 50 | or- 42° C.; | |
| | | | 6 × SSC, 50% | |
| | | | formamide | |
| P | DNA:RNA | <50 | Tp*; 6 × SSC | Tp*; 6 × SSC |
| Q | RNA:RNA | > or equal to | 60° C.; 4 × SSC - | 60° C.; 2 × SSC |
| | | 50 | or- 45° C.; | |
| | | | 6 × SSC, 50% | |
| | | | formamide | |
| R | RNA:RNA | <50 | Tr*; 4 × SSC | Tr*; 4 × SSC |

[0315] ‡—The “hybrid length” is the anticipated length for the hybridized region(s) of the hybridizing polynucleotides. When hybridizing a polynucleotide of unknown sequence, the hybrid is assumed to be that of the hybridizing polynucleotide of the present invention. When polynucleotides of known sequence are hybridized, the hybrid length can be determined by aligning the sequences of the polynucleotides and identifying the region of regions of optimal sequence complementarity. Methods of aligning two or more polynucleotide sequences and/or determining the percent identity between two polynucleotide sequences are well known in the art (e.g., MegAlign program of the DNA*Star suite of programs, etc).

[0316] †—SSPE (1×SSPE is 0.15M NaCl, 10 mM NaH2PO4, and 1.25 mM EDTA, pH 7.4) can be substituted for SSC (1×SSC is 0.15M NaCl and 15 mM sodium citrate) in the hybridization and wash buffers; washes are performed for 15 minutes after hybridization is complete. The hydridizations and washes may additionally include 5× Denhardt's reagent, 0.5-1.0% SDS, 100 ug/ml denatured, fragmented salmon sperm DNA, 0.5% sodium pyrophosphate, and up to 50% formamide.

[0317] *Tb-Tr: The hybridization temperature for hybrids anticipated to be less than 50 base pairs in length should be 5-10° C. less than the melting temperature Tm of the hybrids there Tm is determined according to the following equations. For hybrids less than 18 base pairs in length, Tm(° C.)=2(# of A+T bases)+4(# of G+C bases). For hybrids between 18 and 49 base pairs in length, Tm(° C.)=81.5±16.6(log₁₀[Na+])+0.41(%G+C)−(600/N), where N is the number of bases in the hybrid, and [Na+] is the concentration of sodium ions in the hybridization buffer ([NA+] for 1×SSC=0.165 M).

[0318] ±—The present invention encompasses the substitution of any one, or more DNA or RNA hybrid partners with either a PNA, or a modified polynucleotide. Such modified polynucleotides are known in the art and are more particularly described elsewhere herein.

[0319] Additional examples of stringency conditions for polynucleotide hybridization are provided, for example, in Sambrook, J., E. F. Fritsch, and T. Maniatis, 1989, Molecular Cloning: A Laboratory Manual, Cold Spring Harbor Laboratory Press, Cold Spring Harbor, N.Y., chapters 9 and 11, and Current Protocols in Molecular Biology, 1995, F. M., Ausubel et al., eds, John Wiley and Sons, Inc., sections 2.10 and 6.3-6.4, which are hereby incorporated by reference herein.

[0320] Preferably, such hybridizing polynucleotides have at least 70% sequence identity (more preferably, at least 80% identity; and most preferably at least 90% or 95% identity) with the polynucleotide of the present invention to which they hybridize, where sequence identity is determined by comparing the sequences of the hybridizing polynucleotides when aligned so as to maximize overlap and identity while minimizing sequence gaps. The determination of identity is well known in the art, and discussed more specifically elsewhere herein.

[0321] The invention encompasses the application of PCR methodology to the polynucleotide sequences of the present invention, and/or the cDNA encoding the polypeptides of the present invention. PCR techniques for the amplification of nucleic acids are described in U.S. Pat. No. 4,683,195 and Saiki et al., Science, 239:487-491 (1988). PCR, for example, may include the following steps, of denaturation of template nucleic acid (if double-stranded), annealing of primer to target, and polymerization. The nucleic acid probed or used as a template in the amplification reaction may be genomic DNA, cDNA, RNA, or a PNA. PCR may be used to amplify specific sequences from genomic DNA, specific RNA sequence, and/or cDNA transcribed from mRNA. References for the general use of PCR techniques, including specific method parameters, include Mullis et al., Cold Spring Harbor Symp. Quant. Biol., 51:263, (1987), Ehrlich (ed), PCR Technology, Stockton Press, NY, 1989; Ehrlich et al., Science, 252:1643-1650, (1991); and “PCR Protocols, A Guide to Methods and Applications”, Eds., Innis et al., Academic Press, New York, (1990).

### Polynucleotide and Polypeptide Variants

[0322] The present invention also encompasses variants (e.g., allelic variants, orthologs, etc.) of the polynucleotide sequence disclosed herein in SEQ ID NO:5, 7, 9, 11, 13, 15, 17, 19, 21, 23, 25, 27, 29, 31, 33, 35, 37, 39, 41, 43, 45, 47, 49, and/or 603, the complementary strand thereto.

[0323] The present invention also encompasses variants of the polypeptide sequence, and/or fragments therein, disclosed in SEQ ID NO:6, 8, 10, 12, 14, 16, 18, 20, 22, 24, 26, 28, 30, 32, 34, 36, 38, 40, 42, 44, 46, 48, 50, and/or 604, a polypeptide encoded by the polynucleotide sequence in SEQ ID NO:5, 7, 9, 11, 13, 15, 17, 19, 21, 23, 25, 27, 29, 31, 33, 35, 37, 39, 41, 43, 45, 47, 49, and/or 603.

[0324] “Variant” refers to a polynucleotide or polypeptide differing from the polynucleotide or polypeptide of the present invention, but retaining essential properties thereof. Generally, variants are overall closely similar, and, in many regions, identical to the polynucleotide or polypeptide of the present invention.

[0325] Thus, one aspect of the invention provides an isolated nucleic acid molecule comprising, or alternatively consisting of, a polynucleotide having a nucleotide sequence selected from the group consisting of: (a) a nucleotide sequence encoding a related polypeptide of the present invention having an amino acid sequence as shown in the sequence listing and described in SEQ ID NO:5, 7, 9, 11, 13, 15, 17, 19, 21, 23, 25, 27, 29, 31, 33, 35, 37, 39, 41, 43, 45, 47, 49, and/or 603 ; (b) a nucleotide sequence encoding a mature related polypeptide of the present invention having the amino acid sequence as shown in the sequence listing and described in SEQ ID NO:5, 7, 9, 11, 13, 15, 17, 19, 21, 23, 25, 27, 29, 31, 33, 35, 37, 39, 41, 43, 45, 47, 49, and/or 603; (c) a nucleotide sequence encoding a biologically active fragment of a related polypeptide of the present invention having an amino acid sequence shown in the sequence listing and described in SEQ ID NO:5, 7, 9, 11, 13, 15, 17, 19, 21, 23, 25, 27, 29, 31, 33, 35, 37, 39, 41, 43, 45, 47, 49, and/or 603 ; (d) a nucleotide sequence encoding an antigenic fragment of a related polypeptide of the present invention having an amino acid sequence sown in the sequence listing and described in SEQ ID NO:5, 7,9, 11, 13, 15, 17, 19, 21, 23, 25, 27, 29, 31, 33, 35, 37, 39, 41, 43, 45, 47, 49, and/or 603; (e) a nucleotide sequence encoding a related polypeptide of the present invention comprising the complete amino acid sequence encoded by a human cDNA plasmid contained in SEQ ID NO:5, 7, 9, 11, 13, 15, 17, 19, 21, 23, 25, 27, 29, 31, 33, 35, 37, 39, 41, 43, 45, 47, 49, and/or 603 ; (f) a nucleotide sequence encoding a mature related polypeptide,of the present invention having an amino acid sequence encoded by a human cDNA plasmid contained in SEQ ID NO:5, 7, 9, 11, 13, 15, 17, 19, 21, 23, 25, 27, 29, 31, 33, 35, 37, 39, 41, 43, 45, 47, 49, and/or 603 ; (g) a nucleotide sequence encoding a biologically active fragment of a related polypeptide of the present invention having an amino acid sequence encoded by a human cDNA plasmid contained in SEQ ID NO:5, 7, 9, 11, 13, 15, 17, 19, 21, 23, 25, 27, 29, 31, 33, 35, 37, 39, 41, 43, 45, 47, 49, and/or 603 ; (h) a nucleotide sequence encoding an antigenic fragment of a related polypeptide of the present invention having an amino acid sequence encoded by a human cDNA plasmid contained in SEQ ID NO:5, 7, 9, 11, 13, 15, 17, 19, 21, 23, 25, 27, 29, 31, 33, 35, 37, 39, 41, 43, 45, 47, 49, and/or 603; (I) a nucleotide sequence complimentary to any of the nucleotide sequences in (a), (b), (c), (d), (e), (f), (g), or (h), above.

[0326] The present invention is also directed to polynucleotide sequences which comprise, or alternatively consist of, a polynucleotide sequence which is at least about 80%, 85%, 90%, 91%, 92%, 93%, 94%, 95%, 96%, 97%, 98%, 99%, 99.1% 99.2% 99.3%, 99.4%, 99.5%, 99.6%, 99.7%, 99.8%, or 99.9% identical to, for example, any of the nucleotide sequences in (a), (b), (c), (d), (e), (f), (g), or (h), above. Polynucleotides encoded by these nucleic acid molecules are also encompassed by the invention. In another embodiment, the invention encompasses nucleic acid molecules which comprise, or alternatively, consist of a polynucleotide which hybridizes under stringent conditions, or alternatively, under lower stringency conditions, to a polynucleotide in (a), (b), (c), (d), (e), (f), (g), or (h), above. Polynucleotides which hybridize to the complement of these nucleic acid molecules under stringent hybridization conditions or alternatively, under lower stringency conditions, are also encompassed by the invention, as are polypeptides encoded by these polypeptides.

[0327] Another aspect of the invention provides an isolated nucleic acid molecule comprising, or alternatively, consisting of, a polynucleotide having a nucleotide sequence selected from the group consisting of: (a) a nucleotide sequence encoding a related polypeptide of the present invention having an amino acid sequence as shown in the sequence listing and described in Table I, IV, V, or VI; (b) a nucleotide sequence encoding a mature related polypeptide of the present invention having the amino acid sequence as shown in the sequence listing and described in Table I, IV, V, or VI; (c) a nucleotide sequence encoding a biologically active fragment of a related polypeptide of the present invention having an amino acid sequence as shown in the sequence listing and described in Table I, VI, V, or VI; (d) a nucleotide sequence encoding an antigenic fragment of a related polypeptide of the present invention having an amino acid sequence as shown in the sequence listing and described in Table I, IV, V, or VI; (e) a nucleotide sequence complimentary to any of the nucleotide sequences in (a), (b), (c), (d), or (e) above.

[0328] The present invention is also directed to nucleic acid molecules which comprise, or alternatively, consist of, a nucleotide sequence which is at least about 80%, 85%, 90%, 91%, 92%, 93%, 94%, 95%, 96%, 97%, 98%, 99%, 99.1% 99.2%, 99.3%, 99.4%, 99.5%, 99.6%, 99.7%, 99.8%, or 99.9% identical to, for example, any of the nucleotide sequences in (a), (b), (c), (d), or (e) above.

[0329] The present invention encompasses polypeptide sequences which comprise, or alternatively consist of, an amino acid sequence which is at least about 80%, 85%, 90%, 91%, 92%, 93%, 94%, 95%, 96%, 97%, 98%, 99%, 99.1%, 99.2%, 99.3%, 99.4%, 99.5%, 99.6%, 99.7%, 99.8%, or 99.9% identical to, the following non-limited examples, the polypeptide sequence identified as SEQ ID NO:6, 8, 10, 12, 14, 16, 18, 20, 22, 24, 26, 28, 30, 32, 34, 36, 38, 40, 42, 44, 46, 48, 50, and/or 604, and/or polypeptide fragments of any of the polypeptides provided herein. Polynucleotides encoded by these nucleic acid molecules are also encompassed by the invention. In another embodiment, the invention encompasses nucleic acid molecules which comprise, or alternatively, consist of a polynucleotide which hybridizes under stringent conditions, or alternatively, under lower stringency conditions, to a polynucleotide in (a), (b), (c), (d), or (e) above. Polynucleotides which hybridize to the complement of these nucleic acid molecules under stringent hybridization conditions or alternatively, under lower stringency conditions, are also encompassed by the invention, as are polypeptides encoded by these polypeptides.

[0330] The present invention is also directed to polypeptides which comprise, or alternatively consist of, an amino acid sequence which is at least about 80%, 85%, 90%, 91%, 92%, 93%, 94%, 95%, 96%, 97%, 98%, 99%, 99.1%, 99.2%, 99.3%, 99.4%, 99.5%, 99.6%, 99.7%, 99.8%, or 99.9% identical to, for example, the polypeptide sequence shown in SEQ ID NO:6, 8, 10, 12, 14, 16, 18, 20, 22, 24, 26, 28, 30, 32, 34, 36, 38, 40, 42, 44, 46, 48, 50, and/or 604, a polypeptide sequence encoded by the nucleotide sequence in SEQ ID NO:5, 7, 9, 11, 13, 15, 17, 19, 21, 23, 25, 27, 29, 31, 33, 35, 37, 39, 41, 43, 45, 47, 49, and/or 603, a polypeptide sequence encoded by the cDNA provided in Table I, and/or polypeptide fragments of any of these polypeptides (e.g., those fragments described herein). Polynucleotides which hybridize to the complement of the nucleic acid molecules encoding these polypeptides under stringent hybridization conditions or alternatively, under lower stringency conditions, are also encompasses by the present invention, as are the polypeptides encoded by these polynucleotides.

[0331] By a nucleic acid having a nucleotide sequence at least, for example, 95% “identical” to a reference nucleotide sequence of the present invention, it is intended that the nucleotide sequence of the nucleic acid is identical to the reference sequence except that the nucleotide sequence may include up to five point mutations per each 100 nucleotides of the reference nucleotide sequence encoding the polypeptide. In other words, to obtain a nucleic acid having a nucleotide sequence at least 95% identical to a reference nucleotide sequence, up to 5% of the nucleotides in the reference sequence may be deleted or substituted with another nucleotide, or a number of nucleotides up to 5% of the total nucleotides in the reference sequence may be inserted into the reference sequence. The query sequence may be an entire sequence referenced in Table I, IV, V, or VI, the ORF (open reading frame), or any fragment specified as described herein.

[0332] As a practical matter, whether any particular nucleic acid molecule or polypeptide is at least about 80%, 85%, 90%, 91%, 92%, 93%, 94%, 95%, 96%, 97%, 98%, 99%, 99.1%, 99.2%, 99.3%, 99.4%, 99.5%, 99.6%, 99.7%, 99.8%, or 99.9% identical to a nucleotide sequence of the present invention can be determined conventionally using known computer programs. A preferred method for determining the best overall match between a query sequence (a sequence of the present invention) and a subject sequence, also referred to as a global sequence alignment, can be determined using the CLUSTALW computer program (Thompson, J. D., et al., Nucleic Acids Research, 2(22):4673-4680, (1994)), which is based on the algorithm of Higgins, D. G., et al., Computer Applications in the Biosciences (CABIOS), 8(2):189-191, (1992). In a sequence alignment the query and subject sequences are both DNA sequences. An RNA sequence can be compared by converting U's to T's. The result of said global sequence alignment is in percent identity. Preferred parameters used in a CLUSTALW alignment of DNA sequences to calculate percent identify are: Matrix=BLOSUM, k-tuple=1, Number of Top Diagonals=5, Gap Penalty=3, Gap Open Penalty 10, Gap Extension Penalty=0, Scoring Method=Percent, Window Size=5 or the length of the subject nucleotide sequence, whichever is shorter.

[0333] If the subject sequence is shorter than the query sequence because of 5′ or 3′ deletions, not because of internal deletions, a manual correction must be made to the results. This is because the CLUSTALW program does not account for 5′ and 3′ truncations of the subject sequence when calculating percent identity. For subject sequences truncated at the 5′ or 3′ ends, relative to the query sequence, the percent identity is corrected by calculating the number of bases of the query sequence that are 5′ and 3′ of the subject sequence, which are not matched/aligned, as a percent of the total bases of the query sequence. Whether a nucleotide is matched/aligned is determined by results of the CLUSTALW sequence alignment. This percentage is then subtracted from the percent identity, calculated by the above CLUSTALW program using the specified parameters, to arrive at a final percent identity score. This corrected score is what may be used for the purposes of the present invention. Only bases outside the 5′ and 3′ bases of the subject sequence, as displayed by the CLUSTALW alignment, which are not matched/aligned with the query sequence, are calculated for the purposes of manually adjusting the percent identity score.

[0334] For example, a 90 base subject sequence is aligned to a 100 base query sequence to determine percent identity. The deletions occur at the 5′ end of the subject sequence and therefore, the CLUSTALW alignment does not show a matched/alignment of the first 10 bases at 5′ end. The 10 unpaired bases represent 10% of the sequence (number of bases at the 5′ and 3′ ends not matched/total number of bases in the query sequence) so 10% is subtracted from the percent identity score calculated by the CLUSTALW program. If the remaining 90 bases were perfectly matched the final percent identity would be 90%. In another example, a 90 base subject sequence is compared with a 100 base query sequence. This time the deletions are internal deletions so that there are no bases on the 5′ or 3′ of the subject sequence which are not matched/aligned with the query. In this case the percent identity calculated by CLUSTALW is not manually corrected. Once again, only bases 5′ and 3′ of the subject sequence which are not matched/aligned with the query sequence are manually corrected for. No other manual corrections are required for the purposes of the present invention.

[0335] By a polypeptide having an amino acid sequence at least, for example, 95% “identical” to a query amino acid sequence of the present invention, it is intended that the amino acid sequence of the subject polypeptide is identical to the query sequence except that the subject polypeptide sequence may include up to five amino acid alterations per each 100 amino acids of the query amino acid sequence. In other words, to obtain a polypeptide having an amino acid sequence at least 95% identical to a query amino acid sequence, up to 5% of the amino acid residues in the subject sequence may be inserted, deleted, or substituted with another amino acid. These alterations of the reference sequence may occur at the amino- or carboxy-terminal positions of the reference amino acid sequence or anywhere between those terminal positions, interspersed either individually among residues in the reference sequence or in one or more contiguous groups within the reference sequence.

[0336] As a practical matter, whether any particular polypeptide is at least about 80%, 85%, 90%, 91%, 92%, 93%, 94%, 95%, 96%, 97%, 98%, 99%, 99.1%, 99.2%, 99.3%, 99.4%, 99.5%, 99.6%, 99.7%, 99.8%, or 99.9% identical to, for instance, an amino acid sequence referenced in Table I or Table VI (SEQ ID NO:6, 8, 10, 12, 14, 16, 18, 20, 22, 24, 26, 28, 30, 32, 34, 36, 38, 40, 42, 44, 46, 48, 50, and/or 604) can be determined conventionally using known computer programs. A preferred method for determining the best overall match between a query sequence (a sequence of the present invention) and a subject sequence, also referred to as a global sequence alignment, can be determined using the CLUSTALW computer program (Thompson, J. D., et al., Nucleic Acids Research, 2(22):4673-4680, (1994)), which is based on the algorithm of Higgins, D. G., et al., Computer Applications in the Biosciences (CABIOS), 8(2):189-191, (1992). In a sequence alignment the query and subject sequences are both DNA sequences. An RNA sequence can be compared by converting U's to T's. The result of said global sequence alignment is in percent identity. Preferred parameters used in a CLUSTALW amino acid alignment are: Matrix=BLOSUM, k-tuple=1, Number of Top Diagonals=5, Gap Penalty=3, Gap Open Penalty 10, Gap Extension Penalty=0, Scoring Method=Percent, Window Size=5 or the length of the subject nucleotide sequence, whichever is shorter.

[0337] If the subject sequence is shorter than the query sequence due to N- or C-terminal deletions, not because of internal deletions, a manual correction must be made to the results. This is because the CLUSTALW program does not account for N- and C-terminal truncations of the subject sequence when calculating global percent identity. For subject sequences truncated at the N- and C-terminal, relative to the query sequence, the percent identity is corrected by calculating the number of residues of the query sequence that are N- and C-terminal of the subject sequence, which are not matched/aligned with a corresponding subject residue, as a percent of the total bases of the query sequence. Whether a residue is matched/aligned,is determined by results of the CLUSTALW sequence alignment. This percentage is then subtracted from the percent identity, calculated by the above CLUSTALW program using the specified parameters, to arrive at a final percent identity score. This final percent identity score is what may be used for the purposes of the present invention. Only residues to the N- and C-termini of the subject sequence, which are not matched/aligned with the query sequence, are considered for the purposes of manually adjusting the percent identity score. That is, only query residue positions outside the farthest N- and C-terminal residues of the subject sequence.

[0338] For example, a 90 amino acid residue subject sequence is aligned with a 100 residue query sequence to determine percent identity. The deletion occurs at the N-terminus of the subject sequence and therefore, the CLUSTALW alignment does not show a matching/alignment of the first 10 residues at the N-terminus. The 10 unpaired residues represent 10% of the sequence (number of residues at the N- and C-terminl not matched/total number of residues in the query sequence) so 10% is subtracted from the percent identity score calculated by the CLUSTALW program. If the remaining 90 residues were perfectly matched the final percent identity would be 90%. In another example, a 90 residue subject sequence is compared with a 100 residue query sequence. This time the deletions are internal deletions so there are no residues at the N- or C-termini of the subject sequence, which are not matched/aligned with the query. In this case the percent identity calculated by CLUSTALW is not manually corrected. Once again, only residue positions outside the N- and C-terminal ends of the subject sequence, as displayed in the CLUSTALW alignment, which are not matched/aligned with the query sequence are manually corrected for. No other manual corrections are required for the purposes of the present invention.

[0339] The variants may contain alterations in the coding regions, non-coding regions, or both. Especially preferred are polynucleotide variants containing alterations which produce silent substitutions, additions, or deletions, but do not alter the properties or activities of the encoded polypeptide. Nucleotide variants produced by silent substitutions due to the degeneracy of the genetic code are preferred. Moreover, variants in which 5-10, 1-5, or 1-2 amino acids are substituted, deleted, or added in any combination are also preferred. Polynucleotide variants can be produced for a variety of reasons, e.g., to optimize codon expression for a particular host (change codons in the mRNA to those preferred by a bacterial host such as E. coli).

[0340] Naturally occurring variants are called “allelic variants,” and refer to one of several alternate forms of a gene occupying a given locus on a chromosome of an organism. (Genes II, Lewin, B., ed., John Wiley & Sons, New York (1985).) These allelic variants can vary at either the polynucleotide and/or polypeptide level and are included in the present invention. Alternatively, non-naturally occurring variants may be produced by mutagenesis techniques or by direct synthesis.

[0341] Using known methods of protein engineering and recombinant DNA technology, variants may be generated to improve or alter the characteristics of the polypeptides of the present invention. For instance, one or more amino acids can be deleted from the N-terminus or C-terminus of the protein without substantial loss of biological function. The authors of Ron et al., J. Biol. Chem. 268: 2984-2988 (1993), reported variant KGF proteins having heparin binding activity even after deleting 3, 8, or 27 amino-terminal amino acid residues. Similarly, Interferon gamma exhibited up to ten times higher activity after deleting 8-10 amino acid residues from the carboxy terminus of this protein (Dobeli et al., J. Biotechnology 7:199-216 (1988)).

[0342] Moreover, ample evidence demonstrates that variants often retain a biological activity similar to that of the naturally occurring protein. For example, Gayle and coworkers (J. Biol. Chem. 268:22105-22111 (1993)) conducted extensive mutational analysis of human cytokine IL-la. They used random mutagenesis to generate over 3,500 individual IL-1a mutants that averaged 2.5 amino acid changes per variant over the entire length of the molecule. Multiple mutations were examined at every possible amino acid position. The investigators found that “[m]ost of the molecule could be altered with little effect on either [binding or biological activity].” In fact, only 23 unique amino acid sequences, out of more than 3,500 nucleotide sequences examined, produced a protein that significantly differed in activity from wild-type.

[0343] Furthermore, even if deleting one or more amino acids from the N-terminus or C-terminus of a polypeptide results in modification or loss of one or more biological functions, other biological activities may still be retained. For example, the ability of a deletion variant to induce and/or to bind antibodies which recognize the protein will likely be retained when less than the majority of the residues of the protein are removed from the N-terminus or C-terminus. Whether a particular polypeptide lacking N- or C-terminal residues of a protein retains such immunogenic activities can readily be determined by routine methods described herein and otherwise known in the art.

[0344] Alternatively, such N-terminus or C-terminus deletions of a polypeptide of the present invention may, in fact, result in a significant increase in one or more of the biological activities of the polypeptide(s). For example, biological activity of many polypeptides are governed by the presence of regulatory domains at either one or both termini. Such regulatory domains effectively inhibit the biological activity of such polypeptides in lieu of an activation event (e.g., binding to a cognate ligand or receptor, phosphorylation, proteolytic processing, etc.). Thus, by eliminating the regulatory domain of a polypeptide, the polypeptide may effectively be rendered biologically active in the absence of an activation event.

[0345] Thus, the invention further includes polypeptide variants that show substantial biological activity. Such variants include deletions, insertions, inversions, repeats, and substitutions selected according to general rules known in the art so as have little effect on activity. For example, guidance concerning how to make phenotypically silent amino acid substitutions is provided in Bowie et al., Science 247:1306-1310 (1990), wherein the authors indicate that there are two main strategies for studying the tolerance of an amino acid sequence to change.

[0346] The first strategy exploits the tolerance of amino acid substitutions by natural selection during the process of evolution. By comparing amino acid sequences in different species, conserved amino acids can be identified. These conserved amino acids are likely important for protein function. In contrast, the amino acid positions where substitutions have been tolerated by natural selection indicates that these positions are not critical for protein function. Thus, positions tolerating amino acid substitution could be modified while still maintaining biological activity of the protein.

[0347] The second strategy uses genetic engineering to introduce amino acid changes at specific positions of a cloned gene to identify regions critical for protein function. For example, site directed mutagenesis or alanine-scanning mutagenesis (introduction of single alanine mutations at every residue in the molecule) can be used. (Cunningham and Wells, Science 244:1081-1085 (1989).) The resulting mutant molecules can then be tested for biological activity.

[0348] As the authors state, these two strategies have revealed that proteins are surprisingly tolerant of amino acid substitutions. The authors further indicate which amino acid changes are likely to be permissive at certain amino acid positions in the protein. For example, most buried (within the tertiary structure of the protein) amino acid residues require nonpolar side chains, whereas few features of surface side chains are generally conserved. Moreover, tolerated conservative amino acid substitutions involve replacement of the aliphatic or hydrophobic amino acids Ala, Val, Leu and Ile; replacement of the hydroxyl residues Ser and Thr; replacement of the acidic residues Asp and Glu; replacement of the amide residues Asn and Gln, replacement of the basic residues Lys, Arg, and His; replacement of the aromatic residues Phe, Tyr, and Trp, and replacement of the small-sized amino acids Ala, Ser, Thr, Met, and Gly.

[0349] Besides conservative amino acid substitution, variants of the present invention include, but are not limited to, the following: (i) substitutions with one or more of the non-conserved amino acid residues, where the substituted amino acid residues may or may not be one encoded by the genetic code, or (ii) substitution with one or more of amino acid residues having a substituent group, or (iii) fusion of the mature polypeptide with another compound, such as a compound to increase the stability and/or solubility of the polypeptide (for example, polyethylene glycol), or (iv) fusion of the polypeptide with additional amino acids, such as, for example, an IgG Fc fusion region peptide, or leader or secretory sequence, or a sequence facilitating purification. Such variant polypeptides are deemed to be within the scope of those skilled in the art from the teachings herein.

[0350] For example, polypeptide variants containing amino acid substitutions of charged amino acids with other charged or neutral amino acids may produce proteins with improved characteristics, such as less aggregation. Aggregation of pharmaceutical formulations both reduces activity and increases clearance due to the aggregate's immunogenic activity. (Pinckard et al., Clin. Exp. Immunol. 2:331-340 (1967); Robbins et al., Diabetes 36: 838-845 (1987); Cleland et al., Crit. Rev. Therapeutic Drug Carrier Systems 10:307-377 (1993).)

[0351] Moreover, the invention further includes polypeptide variants created through the application of molecular evolution (“DNA Shuffling”) methodology to the polynucleotide disclosed as SEQ ID NO:5, 7, 9, 11, 13, 15, 17, 19, 21, 23, 25, 27, 29, 31, 33, 35, 37, 39, 41, 43, 45, 47, 49, and/or 603, and/or the cDNA encoding the polypeptide disclosed as SEQ ID NO:6, 8, 10, 12, 14, 16, 18, 20, 22, 24, 26, 28, 30, 32, 34, 36, 38, 40, 42, 44, 46, 48, 50, and/or 604. Such DNA Shuffling technology is known in the art and more particularly described elsewhere herein (e.g., WPC, Stemmer, PNAS, 91:10747, (1994)), and in the Examples provided herein).

[0352] A further embodiment of the invention relates to a polypeptide which comprises the amino acid sequence of the present invention having an amino acid sequence which contains at least one amino acid substitution, but not more than 50 amino acid substitutions, even more preferably, not more than 40 amino acid substitutions, still more preferably, not more than 30 amino acid substitutions, and still even more preferably, not more than 20 amino acid substitutions. Of course, in order of ever-increasing preference, it is highly preferable for a peptide or polypeptide to have an amino acid sequence which comprises the amino acid sequence of the present invention, which contains at least one, but not more than 10, 9, 8, 7, 6, 5, 4, 3, 2 or 1 amino acid substitutions. In specific embodiments, the number of additions, substitutions, and/or deletions in the amino acid sequence of the present invention or fragments thereof (e.g., the mature form and/or other fragments described herein), is 1-5, 5-10, 5-25, 5-50, 10-50 or 50-150, conservative amino acid substitutions are preferable.

### Polynucleotide and Polypeptide Fragments

[0353] The present invention is directed to polynucleotide fragments of the polynucleotides of the invention, in addition to polypeptides encoded therein by said polynucleotides and/or fragments.

[0354] In the present invention, a “polynucleotide fragment” refers to a short polynucleotide having a nucleic acid sequence which: is a portion of that shown in SEQ ID NO:5, 7, 9, 11, 13, 15, 17, 19, 21, 23, 25, 27, 29, 31, 33, 35, 37, 39, 41, 43, 45, 47, 49, and/or 603 or the complementary strand thereto, or is a portion of a polynucleotide sequence encoding the polypeptide of SEQ ID NO:6, 8, 10, 12, 14, 16, 18, 20, 22, 24, 26, 28, 30, 32, 34, 36, 38, 40, 42, 44, 46, 48, 50, and/or 604. The nucleotide fragments of the invention are preferably at least about 15 nt, and more preferably at least about 20 nt, still more preferably at least about 30 nt, and even more preferably, at least about 40 nt, at least about 50 nt, at least about 75 nt, or at least about 150 nt in length. A fragment “at least 20 nt in length,” for example, is intended to include 20 or more contiguous bases from the CDNA sequence shown in SEQ ID NO:5, 7, 9, 11, 13, 15, 17, 19, 21, 23, 25, 27, 29, 31, 33, 35, 37, 39, 41, 43, 45, 47, 49, and/or 603. In this context “about” includes the particularly recited value, a value larger or smaller by several (5, 4, 3, 2, or 1) nucleotides, at either terminus, or at both termini. These nucleotide fragments have uses that include, but are not limited to, as diagnostic probes and primers as discussed herein. Of course, larger fragments (e.g., 50, 150, 500, 600, 2000 nucleotides) are preferred.

[0355] Moreover, representative examples of polynucleotide fragments of the invention, include, for example, fragments comprising, or alternatively consisting of, a sequence from about nucleotide number 1-50, 51-100, 101-150, 151-200, 201-250, 251-300, 301-350, 351-400, 401-450, 451-500, 501-550, 551-600, 651-700, 701-750, 751-800, 800-850, 851-900, 901-950, 951-1000, 1001-1050, 1051-1100, 1101-1150, 1151-1200, 1201-1250, 1251-1300, 1301-1350, 1351-1400, 1401-1450, 1451-1500, 1501-1550, 1551-1600, 1601-1650, 1651-1700, 1701-1750, 1751-1800, 1801-1850, 1851-1900, 1901-1950, 1951-2000, or 2001 to the end of SEQ ID NO:5, 7, 9, 11, 13, 15, 17, 19, 21, 23, 25, 27, 29, 31, 33, 35, 37, 39, 41, 43, 45, 47, 49, and/or 603, or the complementary strand thereto. In this context “about” includes the particularly recited ranges, and ranges larger or smaller by several (5, 4, 3, 2, or 1) nucleotides, at either terminus or at both termini. Preferably, these fragments encode a polypeptide which has biological activity. More preferably, these polynucleotides can be used as probes or primers as discussed herein. Also encompassed by the present invention are polynucleotides which hybridize to these nucleic acid molecules under stringent hybridization conditions or lower stringency conditions, as are the polypeptides encoded by these polynucleotides.

[0356] In the present invention, a “polypeptide fragment” refers to an amino acid sequence which is a portion of that contained in SEQ ID NO:6, 8, 10, 12, 14, 16, 18, 20, 22, 24, 26, 28, 30, 32, 34, 36, 38, 40, 42, 44, 46, 48, 50, and/or 604. Protein (polypeptide) fragments may be “free-standing,” or comprised within a larger polypeptide of which the fragment forms a part or region, most preferably as a single continuous region. Representative examples of polypeptide fragments of the invention, include, for example, fragments comprising, or alternatively consisting of, from about amino acid number 1-20, 21-40, 41-60, 61-80, 81-100, 102-120, 121-140, 141-160, or 161 to the end of the coding region. Moreover, polypeptide fragments can be about 20, 30, 40, 50, 60, 70, 80, 90, 100, 110, 120, 130, 140, or 150 amino acids in length. In this context “about” includes the particularly recited ranges or values, and ranges or values larger or smaller by several (5, 4, 3, 2, or 1) amino acids, at either extreme or at both extremes. Polynucleotides encoding these polypeptides are also encompassed by the invention.

[0357] Preferred polypeptide fragments include the full-length protein. Further preferred polypeptide fragments include the full-length protein having a continuous series of deleted residues from the amino or the carboxy terminus, or both. For example, any number of amino acids, ranging from 1-60, can be deleted from the amino terminus of the full-length polypeptide. Similarly, any number of amino acids, ranging from 1-30, can be deleted from the carboxy terminus of the full-length protein. Furthermore, any combination of the above amino and carboxy terminus deletions are preferred. Similarly, polynucleotides encoding these polypeptide fragments are also preferred.

[0358] Also preferred are polypeptide and polynucleotide fragments characterized by structural or functional domains, such as fragments that comprise alpha-helix and alpha-helix forming regions, beta-sheet and beta-sheet-forming regions, turn and turn-forming regions, coil and coil-forming regions, hydrophilic regions, hydrophobic regions, alpha amphipathic regions, beta amphipathic regions, flexible regions, surface-forming regions, substrate binding region, and high antigenic index regions. Polypeptide fragments of SEQ ID NO:6, 8, 10, 12, 14, 16, 18, 20, 22, 24, 26, 28, 30, 32, 34, 36, 38, 40, 42, 44, 46, 48, 50, and/or 604 falling within conserved domains are specifically contemplated by the present invention. Moreover, polynucleotides encoding these domains are also contemplated.

[0359] Other preferred polypeptide fragments are biologically active fragments. Biologically active fragments are those exhibiting activity similar, but not necessarily identical, to an activity of the polypeptide of the present invention. The biological activity of the fragments may include an improved desired activity, or a decreased undesirable activity. Polynucleotides encoding these polypeptide fragments are also encompassed by the invention.

[0360] In a preferred embodiment, the functional activity displayed by a polypeptide encoded by a polynucleotide fragment of the invention may be one or more biological activities typically associated with the full-length polypeptide of the invention. Illustrative of these biological activities includes the fragments ability to bind to at least one of the same antibodies which bind to the full-length protein, the fragments ability to interact with at lease one of the same proteins which bind to the full-length, the fragments ability to elicit at least one of the same immune responses as the full-length protein (i.e., to cause the immune system to create antibodies specific to the same epitope, etc.), the fragments ability to bind to at least one of the same polynucleotides as the full-length protein, the fragments ability to bind to a receptor of the full-length protein, the fragments ability to bind to a ligand of the full-length protein, and the fragments ability to multimerize with the full-length protein. However, the skilled artisan would appreciate that some fragments may have biological activities which are desirable and directly inapposite to the biological activity of the full-length protein. The functional activity of polypeptides of the invention, including fragments, variants, derivatives, and analogs thereof can be determined by numerous methods available to the skilled artisan, some of which are described elsewhere herein.

[0361] The present invention encompasses polypeptides comprising, or alternatively consisting of, an epitope of the polypeptide having an amino acid sequence of SEQ ID NO:6, 8, 10, 12, 14, 16, 18, 20, 22, 24, 26, 28, 30, 32, 34, 36, 38, 40, 42, 44, 46, 48, 50, and/or 604, or encoded by a polynucleotide that hybridizes to the complement of the sequence of SEQ ID NO:5, 7, 9, 11, 13, 15, 17, 19, 21, 23, 25, 27, 29, 31, 33, 35, 37, 39, 41, 43, 45, 47, 49, and/or 603 under stringent hybridization conditions or lower stringency hybridization conditions as defined supra. The present invention further encompasses polynucleotide sequences encoding an epitope of a polypeptide sequence of the invention (such as, for example, the sequence disclosed in SEQ ID NO:1), polynucleotide sequences of the complementary strand of a polynucleotide sequence encoding an epitope of the invention, and polynucleotide sequences which hybridize to the complementary strand under stringent hybridization conditions or lower stringency hybridization conditions defined supra.

[0362] The term “epitopes,” as used herein, refers to portions of a polypeptide having antigenic or immunogenic activity in an animal, preferably a mammal, and most preferably in a human. In a preferred embodiment, the present invention encompasses a polypeptide comprising an epitope, as well as the polynucleotide encoding this polypeptide. An “immunogenic epitope,” as used herein, is defined as a portion of a protein that elicits an antibody response in an animal, as determined by any method known in the art, for example, by the methods for generating antibodies described infra. (See, for example, Geysen et al., Proc. Natl. Acad. Sci. USA 81:3998-4002 (1983)). The term “antigenic epitope,” as used herein, is defined as a portion of a protein to which an antibody can immunospecifically bind its antigen as determined by any method well known in the art, for example, by the immunoassays described herein. Immunospecific binding excludes non-specific binding but does not necessarily exclude cross-reactivity with other antigens. Antigenic epitopes need not necessarily be immunogenic.

[0363] Fragments which function as epitopes may be produced by any conventional means. (See, e.g., Houghten, Proc. Natl. Acad. Sci. USA 82:5131-5135 (1985), further described in U.S. Pat. No. 4,631,211).

[0364] In the present invention, antigenic epitopes preferably contain a sequence of at least 4, at least 5, at least 6, at least 7, more preferably at least 8, at least 9, at least 10, at least 11, at least 12, at least 13, at least 14, at least 15, at least 20, at least 25, at least 30, at least 40, at least 50, and, most preferably, between about 15 to about 30 amino acids. Preferred polypeptides comprising immunogenic or antigenic epitopes are at least 10, 15, 20, 25, 30, 35, 40, 45, 50, 55, 60, 65, 70, 75, 80, 85, 90, 95, or 100 amino acid residues in length, or longer. Additional non-exclusive preferred antigenic epitopes include the antigenic epitopes disclosed herein, as well as portions thereof. Antigenic epitopes are useful, for example, to raise antibodies, including monoclonal antibodies, that specifically bind the epitope. Preferred antigenic epitopes include the antigenic epitopes disclosed herein, as well as any combination of two, three, four, five or more of these antigenic epitopes. Antigenic epitopes can be used as the target molecules in immunoassays. (See, for instance, Wilson et al., Cell 37:767-778 (1984); Sutcliffe et al., Science 219:660-666 (1983)).

[0365] Similarly, immunogenic epitopes can be used, for example, to induce antibodies according to methods well known in the art. (See, for instance, Sutcliffe et al., supra; Wilson et al., supra; Chow et al., Proc. Natl. Acad. Sci. USA 82:910-914; and Bittle et al., J. Gen. Virol. 66:2347-2354 (1985). Preferred immunogenic epitopes include the immunogenic epitopes disclosed herein, as well as any combination of two, three, four, five or more of these immunogenic epitopes. The polypeptides comprising one or more immunogenic epitopes may be presented for eliciting an antibody response together with a carrier protein, such as an albumin, to an animal system (such as rabbit or mouse), or, if the polypeptide is of sufficient length (at least about 25 amino acids), the polypeptide may be presented without a carrier. However, immunogenic epitopes comprising as few as 8 to 10 amino acids have been shown to be sufficient to raise antibodies capable of binding to, at the very least, linear epitopes in a denatured polypeptide (e.g., in Western blotting).

[0366] Epitope-bearing polypeptides of the present invention may be used to induce antibodies according to methods well known in the art including, but not limited to, in vivo immunization, in vitro immunization, and phage display methods. See, e.g., Sutcliffe et al., supra; Wilson et al., supra, and Bittle et al., J. Gen. Virol., 66:2347-2354 (1985). If in vivo immunization is used, animals may be immunized with free peptide; however, anti-peptide antibody titer may be boosted by coupling the peptide to a macromolecular carrier, such as keyhole limpet hemacyanin (KLH) or tetanus toxoid. For instance, peptides containing cysteine residues may be coupled to a carrier using a linker such as maleimidobenzoyl-N-hydroxysuccinimide ester (MBS), while other peptides may be coupled to carriers using a more general linking agent such as glutaraldehyde. Animals such as rabbits, rats and mice are immunized with either free or carrier-coupled peptides, for instance, by intraperitoneal and/or intradermal injection of emulsions containing about 100 μg of peptide or carrier protein and Freund's adjuvant or any other adjuvant known for stimulating an immune response. Several booster injections may be needed, for instance, at intervals of about two weeks, to provide a useful titer of anti-peptide antibody which can be detected, for example, by ELISA assay using free peptide adsorbed to a solid surface. The titer of anti-peptide antibodies in serum from an immunized animal may be increased by selection of anti-peptide antibodies, for instance, by adsorption to the peptide on a solid support and elution of the selected antibodies according to methods well known in the art.

[0367] As one of skill in the art will appreciate, and as discussed above, the polypeptides of the present invention comprising an immunogenic or antigenic epitope can be fused to other polypeptide sequences. For example, the polypeptides of the present invention may be fused with the constant domain of immunoglobulins (IgA, IgE, IgG, IgM), or portions thereof (CH1, CH2, CH3, or any combination thereof and portions thereof) resulting in chimeric polypeptides. Such fusion proteins may facilitate purification and may increase half-life in vivo. This has been shown for chimeric proteins consisting of the first two domains of the human CD4-polypeptide and various domains of the constant regions of the heavy or light chains of mammalian immunoglobulins. See, e.g., EP 394,827; Traunecker et al., Nature, 331:84-86 (1988). Enhanced delivery of an antigen across the epithelial barrier to the immune system has been demonstrated for antigens (e.g., insulin) conjugated to an FcRn binding partner such as IgG or Fc fragments (see, e.g., PCT Publications WO 96/22024 and WO 99/04813). IgG Fusion proteins that have a disulfide-linked dimeric structure due to the IgG portion disulfide bonds have also been found to be more efficient in binding and neutralizing other molecules than monomeric polypeptides or fragments thereof alone. See, e.g., Fountoulakis et al., J. Biochem., 270:3958-3964 (1995). Nucleic acids encoding the above epitopes can also be recombined with a gene of interest as an epitope tag (e.g., the hemagglutinin (“HA”) tag or flag tag) to aid in detection and purification of the expressed polypeptide. For example, a system described by Janknecht et al. allows for the ready purification of non-denatured fusion proteins expressed in human cell lines (Janknecht et al., 1991, Proc. Natl. Acad. Sci. USA 88:8972-897). In this system, the gene of interest is subcloned into a vaccinia recombination plasmid such that the open reading frame of the gene is translationally fused to an amino-terminal tag consisting of six histidine residues. The tag serves as a matrix binding domain for the fusion protein. Extracts from cells infected with the recombinant vaccinia virus are loaded onto Ni2+ nitriloacetic acid-agarose column and histidine-tagged proteins can be selectively eluted with imidazole-containing buffers.

[0368] Additional fusion proteins of the invention may be generated through the techniques of gene-shuffling, motif-shuffling, exon-shuffling, and/or codon-shuffling (collectively referred to as “DNA shuffling”). DNA shuffling may be employed to modulate the activities of polypeptides of the invention, such methods can be used to generate polypeptides with altered activity, as well as agonists and antagonists of the polypeptides. See, generally, U.S. Pat. Nos. 5,605,793; 5,811,238; 5,830,721; 5,834,252; and 5,837,458, and Patten et al., Curr. Opinion Biotechnol. 8:724-33 (1997); Harayama, Trends Biotechnol. 16(2):76-82 (1998); Hansson, et al., J. Mol. Biol. 287:265-76 (1999); and Lorenzo and Blasco, Biotechniques 24(2):308-13 (1998) (each of these patents and publications are hereby incorporated by reference in its entirety). In one embodiment, alteration of polynucleotides corresponding to SEQ ID NO:5, 7, 9, 11, 13, 15, 17, 19, 21, 23, 25, 27, 29, 31, 33, 35, 37, 39, 41, 43, 45, 47, 49, and/or 603 and the polypeptides encoded by these polynucleotides may be achieved by DNA shuffling. DNA shuffling involves the assembly of two or more DNA segments by homologous or site-specific recombination to generate variation in the polynucleotide sequence. In another embodiment, polynucleotides of the invention, or the encoded polypeptides, may be altered by being subjected to random mutagenesis by error-prone PCR, random nucleotide insertion or other methods prior to recombination. In another embodiment, one or more components, motifs, sections, parts, domains, fragments, etc., of a polynucleotide encoding a polypeptide of the invention may be recombined with one or more components, motifs, sections, parts, domains, fragments, etc. of one or more heterologous molecules.

### Antibodies

[0369] Further polypeptides of the invention relate to antibodies and T-cell antigen receptors (TCR) which immunospecifically bind a polypeptide, polypeptide fragment, or variant of SEQ ID NO:6, 8, 10, 12, 14, 16, 18, 20, 22, 24, 26, 28, 30, 32, 34, 36, 38, 40, 42, 44, 46, 48, 50, and/or 604, and/or an epitope, of the present invention (as determined by immunoassays well known in the art for assaying specific antibody-antigen binding). Antibodies of the invention include, but are not limited to, polyclonal, monoclonal, monovalent, bispecific, heteroconjugate, multispecific, human, humanized or chimeric antibodies, single chain antibodies, Fab fragments, F(ab′) fragments, fragments produced by a Fab expression library, anti-idiotypic (anti-Id) antibodies (including, e.g., anti-Id antibodies to antibodies of the invention), and epitope-binding fragments of any of the above. The term “antibody,” as used herein, refers to immunoglobulin molecules and immunologically active portions of immunoglobulin molecules, i.e., molecules that contain an antigen binding site that immunospecifically binds an antigen. The immunoglobulin molecules of the invention can be of any type (e.g., IgG, IgE, IgM, IgD, IgA and IgY), class (e.g., IgG1, IgG2, IgG3, IgG4, IgA1 and IgA2) or subclass of immunoglobulin molecule. Moreover, the term “antibody” (Ab) or “monoclonal antibody” (Mab) is meant to include intact molecules, as well as, antibody fragments (such as, for example, Fab and F(ab′)2 fragments) which are capable of specifically binding to protein. Fab and F(ab′)2 fragments lack the Fc fragment of intact antibody, clear more rapidly from the circulation of the animal or plant, and may have less non-specific tissue binding than an intact antibody (Wahl et al., J. Nucl. Med. 24:316-325 (1983)). Thus, these fragments are preferred, as well as the products of a FAB or other immunoglobulin expression library. Moreover, antibodies of the present invention include chimeric, single chain, and humanized antibodies.

[0370] Most preferably the antibodies are human antigen-binding antibody fragments of the present invention and include, but are not limited to, Fab, Fab′ and F(ab′)2, Fd, single-chain Fvs (scFv), single-chain antibodies, disulfide-linked Fvs (sdFv) and fragments comprising either a VL or VH domain. Antigen-binding antibody fragments, including single-chain antibodies, may comprise the variable region(s) alone or in combination with the entirety or a portion of the following: hinge region, CH1, CH2, and CH3 domains. Also included in the invention are antigen-binding fragments also comprising any combination of variable region(s) with a hinge region, CH1, CH2, and CH3 domains. The antibodies of the invention may be from any animal origin including birds and mammals. Preferably, the antibodies are human, murine (e.g., mouse and rat), donkey, ship rabbit, goat, guinea pig, camel, horse, or chicken. As used herein, “human” antibodies include antibodies having the amino acid sequence of a human immunoglobulin and include antibodies isolated from human immunoglobulin libraries or from animals transgenic for one or more human immunoglobulin and that do not express endogenous immunoglobulins, as described infra and, for example in, U.S. Pat. No. 5,939,598 by Kucherlapati et al.

[0371] The antibodies of the present invention may be monospecific, bispecific, trispecific or of greater multispecificity. Multispecific antibodies may be specific for different epitopes of a polypeptide of the present invention or may be specific for both a polypeptide of the present invention as well as for a heterologous epitope, such as a heterologous polypeptide or solid support material. See, e.g., PCT publications WO 93/17715; WO 92/08802; WO 91/00360; WO 92/05793; Tutt, et al., J. Immunol. 147:60-69 (1991); U.S. Pat. Nos. 4,474,893; 4,714,681; 4,925,648; 5,573,920; 5,601,819; Kostelny et al., J. Immunol. 148:1547-1553 (1992).

[0372] Antibodies of the present invention may be described or specified in terms of the epitope(s) or portion(s) of a polypeptide of the present invention which they recognize or specifically bind. The epitope(s) or polypeptide portion(s) may be specified as described herein, e.g., by N-terminal and C-terminal positions, by size in contiguous amino acid residues, or listed in the Tables and Figures. Antibodies which specifically bind any epitope or polypeptide of the present invention may also be excluded. Therefore, the present invention includes antibodies that specifically bind polypeptides of the present invention, and allows for the exclusion of the same.

[0373] Antibodies of the present invention may also be described or specified in terms of their cross-reactivity. Antibodies that do not bind any other analog, ortholog, or homologue of a polypeptide of the present invention are included. Antibodies that bind polypeptides with at least 95%, at least 90%, at least 85%, at least 80%, at least 75%, at least 70%, at least 65%, at least 60%, at least 55%, and at least 50% identity (as calculated using methods known in the art and described herein) to a polypeptide of the present invention are also included in the present invention. In specific embodiments, antibodies of the present invention cross-react with murine, rat and/or rabbit homologues of human proteins and the corresponding epitopes thereof. Antibodies that do not bind polypeptides with less than 95%, less than 90%, less than 85%, less than 80%, less than 75%, less than 70%, less than 65%, less than 60%, less than 55%, and less than 50% identity (as calculated using methods known in the art and described herein) to a polypeptide of the present invention are also included in the present invention. In a specific embodiment, the above-described cross-reactivity is with respect to any single specific antigenic or immunogenic polypeptide, or combination(s) of 2, 3, 4, 5, or more of the specific antigenic and/or immunogenic polypeptides disclosed herein. Further included in the present invention are antibodies which bind polypeptides encoded by polynucleotides which hybridize to a polynucleotide of the present invention under stringent hybridization conditions (as described herein). Antibodies of the present invention may also be described or specified in terms of their binding affinity to a polypeptide of the invention. Preferred binding affinities include those with a dissociation constant or Kd less than 5×10-2 M, 10-2 M, 5×10-3 M, 10-3 M, 5×10-4 M, 10-4 M, 5×10-5 M, 10-5 M, 5×10-6 M, 10-6M, 5×10-7 M, 107 M, 5×10-8 M, 10-8 M, 5×10-9 M, 10-9 M, 5×10-10 M, 10-10 M, 5×10-11 M, 10-11 M, 5×10-12 M, 10-12 M, 5×10-13 M, 10-13 M, 5×10-14 M, 10-14 M, 5×10-15 M, or 10-15 M.

[0374] The invention also provides antibodies that competitively inhibit binding of an antibody to an epitope of the invention as determined by any method known in the art for determining competitive binding, for example, the immunoassays described herein. In preferred embodiments, the antibody competitively inhibits binding to the epitope by at least 95%, at least 90%, at least 85%, at least 80%, at least 75%, at least 70%, at least 60%, or at least 50%.

[0375] Antibodies of the present invention may act as agonists or antagonists of the polypeptides of the present invention. For example, the present invention includes antibodies which disrupt the receptor/ligand interactions with the polypeptides of the invention either partially or fully. Preferably, antibodies of the present invention bind an antigenic epitope disclosed herein, or a portion thereof. The invention features both receptor-specific antibodies and ligand-specific antibodies. The invention also features receptor-specific antibodies which do not prevent ligand binding but prevent receptor activation. Receptor activation (i.e., signaling) may be determined by techniques described herein or otherwise known in the art. For example, receptor activation can be determined by detecting the phosphorylation (e.g., tyrosine or serine/threonine) of the receptor or its substrate by immunoprecipitation followed by western blot analysis (for example, as described supra). In specific embodiments, antibodies are provided that inhibit ligand activity or receptor activity by at least 95%, at least 90%, at least 85%, at least 80%, at least 75%, at least 70%, at least 60%, or at least 50% of the activity in absence of the antibody.

[0376] The invention also features receptor-specific antibodies which both prevent ligand binding and receptor activation as well as antibodies that recognize the receptor-ligand complex, and, preferably, do not specifically recognize the unbound receptor or the unbound ligand. Likewise, included in the invention are neutralizing antibodies which bind the ligand and prevent binding of the ligand to the receptor, as well as antibodies which bind the ligand, thereby preventing receptor activation, but do not prevent the ligand from binding the receptor. Further included in the invention are antibodies which activate the receptor. These antibodies may act as receptor agonists, i.e., potentiate or activate either all or a subset of the biological activities of the ligand-mediated receptor activation, for example, by inducing dimerization of the receptor. The antibodies may be specified as agonists, antagonists or inverse agonists for biological activities comprising the specific biological activities of the peptides of the invention disclosed herein. The above antibody agonists can be made using methods known in the art. See, e.g., PCT publication WO 96/40281; U.S. Pat. No. 5,811,097; Deng et al., Blood 92(6):1981-1988 (1998); Chen et al., Cancer Res. 58(16):3668-3678 (1998); Harrop et al., J. Immunol. 161(4):1786-1794 (1998); Zhu et al., Cancer Res. 58(15):3209-3214 (1998); Yoon et al., J. Immunol. 160(7):3170-3179 (1998); Prat et al., J. Cell. Sci. 111(Pt2):237-247 (1998); Pitard et al., J. Immunol. Methods 205(2):177-190 (1997); Liautard et al., Cytokine 9(4):233-241 (1997); Carlson et al., J. Biol. Chem. 272(17):11295-11301 (1997); Taryman et al., Neuron 14(4):755-762 (1995); Muller et al., Structure 6(9):1153-1167 (1998); Bartunek et al., Cytokine 8(1):14-20 (1996) (which are all incorporated by reference herein in their entireties).

[0377] Antibodies of the present invention may be used, for example, but not limited to, to purify, detect, and target the polypeptides of the present invention, including both in vitro and in vivo diagnostic and therapeutic methods. For example, the antibodies have use in immunoassays for qualitatively and quantitatively measuring levels of the polypeptides of the present invention in biological samples. See, e.g., Harlow et al., Antibodies: A Laboratory Manual, (Cold Spring Harbor Laboratory Press, 2nd ed. 1988) (incorporated by reference herein in its entirety).

[0378] As discussed in more detail below, the antibodies of the present invention may be used either alone or in combination with other compositions. The antibodies may further be recombinantly fused to a heterologous polypeptide at the N- or C-terminus or chemically conjugated (including covalently and non-covalently conjugations) to polypeptides or other compositions. For example, antibodies of the present invention may be recombinantly fused or conjugated to molecules useful as labels in detection assays and effector molecules such as heterologous polypeptides, drugs, radionucleotides, or toxins. See, e.g., PCT publications WO 92/08495; WO 91/14438; WO 89/12624; U.S. Pat. No. 5,314,995; and EP 396,387.

[0379] The antibodies of the invention include derivatives that are modified, i.e., by the covalent attachment of any type of molecule to the antibody such that covalent attachment does not prevent the antibody from generating an anti-idiotypic response. For example, but not by way of limitation, the antibody derivatives include antibodies that have been modified, e.g., by glycosylation, acetylation, pegylation, phosphorylation, amidation, derivatization by known protecting/blocking groups, proteolytic cleavage, linkage to a cellular ligand or other protein, etc. Any of numerous chemical modifications may be carried out by known techniques, including, but not limited to specific chemical cleavage, acetylation, formylation, metabolic synthesis of tunicamycin, etc. Additionally, the derivative may contain one or more non-classical amino acids.

[0380] The antibodies of the present invention may be generated by any suitable method known in the art.

[0381] The antibodies of the present invention may comprise polyclonal antibodies. Methods of preparing polyclonal antibodies are known to the skilled artisan (Harlow, et al., Antibodies: A Laboratory Manual, (Cold spring Harbor Laboratory Press, 2^{nd} ed. (1988); and Current Protocols, Chapter 2; which are hereby incorporated herein by reference in its entirety). In a preferred method, a preparation of the polymorphic protein is prepared and purified to render it substantially free of natural contaminants. Such a preparation is then introduced into an animal in order to produce polyclonal antisera of greater specific activity. For example, a polypeptide of the invention can be administered to various host animals including, but not limited to, rabbits, mice, rats, etc. to induce the production of sera containing polyclonal antibodies specific for the antigen. The administration of the polypeptides of the present invention may entail one or more injections of an immunizing agent and, if desired, an adjuvant. Various adjuvants may be used to increase the immunological response, depending on the host species, and include but are not limited to, Freund's (complete and incomplete), mineral gels such as aluminum hydroxide, surface active substances such as lysolecithin, pluronic polyols, polyanions, peptides, oil emulsions, keyhole limpet hemocyanins, dinitrophenol, and potentially useful human adjuvants such as BCG (bacille Calmette-Guerin) and corynebacterium parvum. Such adjuvants are also well known in the art. For the purposes of the invention, “immunizing agent” may be defined as a polypeptide of the invention, including fragments, variants, and/or derivatives thereof, in addition to fusions with heterologous polypeptides and other forms of the polypeptides described herein.

[0382] Typically, the immunizing agent and/or adjuvant will be injected in the mammal by multiple subcutaneous or intraperitoneal injections, though they may also be given intramuscularly, and/or through IV). The immunizing agent may include polypeptides of the present invention or a fusion protein or variants thereof. Depending upon the nature of the polypeptides (i.e., percent hydrophobicity, percent hydrophilicity, stability, net charge, isoelectric point etc.), it may be useful to conjugate the immunizing agent to a protein known to be immunogenic in the mammal being immunized. Such conjugation includes either chemical conjugation by derivitizing active chemical functional groups to both the polypeptide of the present invention and the immunogenic protein such that a covalent bond is formed, or through fusion-protein based methodology, or other methods known to the skilled artisan. Examples of such immunogenic proteins include, but are not limited to keyhole limpet hemocyanin, serum albumin, bovine thyroglobulin, and soybean trypsin inhibitor. Various adjuvants may be used to increase the immunological response, depending on the host species, including but not limited to Freund's (complete and incomplete), mineral gels such as aluminum hydroxide, surface active substances such as lysolecithin, pluronic polyols, polyanions, peptides, oil emulsions, keyhole limpet hemocyanin, dinitrophenol, and potentially useful human adjuvants such as BCG (bacille Calmette-Guerin) and Corynebacterium parvum. Additional examples of adjuvants which may be employed includes the MPL-TDM adjuvant (monophosphoryl lipid A, synthetic trehalose dicorynomycolate). The immunization protocol may be selected by one skilled in the art without undue experimentation.

[0383] The antibodies of the present invention may comprise monoclonal antibodies. Monoclonal antibodies may be prepared using hybridoma methods, such as those described by Kohler and Milstein, Nature, 256:495 (1975) and U.S. Pat. No. 4,376,110, by Harlow, et al., Antibodies: A Laboratory Manual, (Cold spring Harbor Laboratory Press, 2^{nd} ed. (1988), by Hammerling, et al., Monoclonal Antibodies and T-Cell Hybridomas (Elsevier, N.Y., pp. 563-681 (1981); Köhler et al., Eur. J. Immunol. 6:511 (1976); Köhler et al., Eur. J. Immunol. 6:292 (1976), or other methods known to the artisan. Other examples of methods which may be employed for producing monoclonal antibodies includes, but are not limited to, the human B-cell hybridoma technique (Kosbor et al., 1983, Immunology Today 4:72; Cole et al., 1983, Proc. Natl. Acad. Sci. USA 80:2026-2030), and the EBV-hybridoma technique (Cole et al., 1985, Monoclonal Antibodies And Cancer Therapy, Alan R. Liss, Inc., pp. 77-96). Such antibodies may be of any immunoglobulin class including IgG, IgM, IgE, IgA, IgD and any subclass thereof. The hybridoma producing the mAb of this invention may be cultivated in vitro or in vivo. Production of high titers of mAbs in vivo makes this the presently preferred method of production.

[0384] In a hybridoma method, a mouse, a humanized mouse, a mouse with a human immune system, hamster, or other appropriate host animal, is typically immunized with an immunizing agent to elicit lymphocytes that produce or are capable of producing antibodies that will specifically bind to the immunizing agent. Alternatively, the lymphocytes may be immunized in vitro.

[0385] The immunizing agent will typically include polypeptides of the present invention or a fusion protein thereof. Preferably, the immunizing agent consists of an polymorphic polypeptide or, more preferably, with a polymorphic polypeptide-expressing cell. Such cells may be cultured in any suitable tissue culture medium; however, it is preferable to culture cells in Earle's modified Eagle's medium supplemented with 10% fetal bovine serum (inactivated at about 56 degrees C), and supplemented with about 10 g/l of nonessential amino acids, about 1,000 U/ml of penicillin, and about 100 ug/ml of streptomycin. Generally, either peripheral blood lymphocytes (“PBLs”) are used if cells of human origin are desired, or spleen cells or lymph node cells are used if non-human mammalian sources are desired. The lymphocytes are then fused with an immortalized cell line using a suitable fusing agent, such as polyethylene glycol, to form a hybridoma cell (Goding, Monoclonal Antibodies: Principles and Practice, Academic Press, (1986), pp. 59-103). Immortalized cell lines are usually transformed mammalian cells, particularly myeloma cells of rodent, bovine and human origin. Usually, rat or mouse myeloma cell lines are employed. The hybridoma cells may be cultured in a suitable culture medium that preferably contains one or more substances that inhibit the growth or survival of the unfused, immortalized cells. For example, if the parental cells lack the enzyme hypoxanthine guanine phosphoribosyl transferase (HGPRT or HPRT), the culture medium for the hybridomas typically will include hypoxanthine, aminopterin, and thymidine (“HAT medium”), which substances prevent the growth of HGPRT-deficient cells.

[0386] Preferred immortalized cell lines are those that fuse efficiently, support stable high level expression of antibody by the selected antibody-producing cells, and are sensitive to a medium such as HAT medium. More preferred immortalized cell lines are murine myeloma lines, which can be obtained, for instance, from the Salk Institute Cell Distribution Center, San Diego, Calif. and the American Type Culture Collection, Manassas, Va. More preferred are the parent myeloma cell line (SP2O) as provided by the ATCC. As inferred throughout the specification, human myeloma and mouse-human heteromyeloma cell lines also have been described for the production of human monoclonal antibodies (Kozbor, J. Immunol., 133:3001 (1984); Brodeur et al., Monoclonal Antibody Production Techniques and Applications, Marcel Dekker, Inc., New York, (1987) pp. 51-63).

[0387] The culture medium in which the hybridoma cells are cultured can then be assayed for the presence of monoclonal antibodies directed against the polypeptides of the present invention. Preferably, the binding specificity of monoclonal antibodies produced by the hybridoma cells is determined by immunoprecipitation or by an in vitro binding assay, such as radioimmunoassay (RIA) or enzyme-linked immunoabsorbant assay (ELISA). Such techniques are known in the art and within the skill of the artisan. The binding affinity of the monoclonal antibody can, for example, be determined by the Scatchard analysis of Munson and Pollart, Anal. Biochem., 107:220 (1980).

[0388] After the desired hybridoma cells are identified, the clones may be subcloned by limiting dilution procedures and grown by standard methods (Goding, supra, and/or according to Wands et al. (Gastroenterology 80:225-232 (1981)). Suitable culture media for this purpose include, for example, Dulbecco's Modified Eagle's Medium and RPMI-1640. Alternatively, the hybridoma cells may be grown in vivo as ascites in a mammal.

[0389] The monoclonal antibodies secreted by the subclones may be isolated or purified from the culture medium or ascites fluid by conventional immunoglobulin purification procedures such as, for example, protein A-sepharose, hydroxyapatite chromatography, gel exclusion chromatography, gel electrophoresis, dialysis, or affinity chromatography.

[0390] The skilled artisan would acknowledge that a variety of methods exist in the art for the production of monoclonal antibodies and thus, the invention is not limited to their sole production in hydridomas. For example, the monoclonal antibodies may be made by recombinant DNA methods, such as those described in U.S. Pat. No. 4,816,567. In this context, the term “monoclonal antibody” refers to an antibody derived from a single eukaryotic, phage, or prokaryotic clone. The DNA encoding the monoclonal antibodies of the invention can be readily isolated and sequenced using conventional procedures (e.g., by using oligonucleotide probes that are capable of binding specifically to genes encoding the heavy and light chains of murine antibodies, or such chains from human, humanized, or other sources). The hydridoma cells of the invention serve as a preferred source of such DNA. Once isolated, the DNA may be placed into expression vectors, which are then transformed into host cells such as Simian COS cells, Chinese hamster ovary (CHO) cells, or myeloma cells that do not otherwise produce immunoglobulin protein, to obtain the synthesis of monoclonal antibodies in the recombinant host cells. The DNA also may be modified, for example, by substituting the coding sequence for human heavy and light chain constant domains in place of the homologous murine sequences (U.S. Pat. No. 4,816,567; Morrison et al, supra) or by covalently joining to the immunoglobulin coding sequence all or part of the coding sequence for a non-immunoglobulin polypeptide. Such a non-immunoglobulin polypeptide can be substituted for the constant domains of an antibody of the invention, or can be substituted for the variable domains of one antigen-combining site of an antibody of the invention to create a chimeric bivalent antibody.

[0391] The antibodies may be monovalent antibodies. Methods for preparing monovalent antibodies are well known in the art. For example, one method involves recombinant expression of immunoglobulin light chain and modified heavy chain. The heavy chain is truncated generally at any point in the Fc region so as to prevent heavy chain crosslinking. Alternatively, the relevant cysteine residues are substituted with another amino acid residue or are deleted so as to prevent crosslinking.

[0392] In vitro methods are also suitable for preparing monovalent antibodies. Digestion of antibodies to produce fragments thereof, particularly, Fab fragments, can be accomplished using routine techniques known in the art. Monoclonal antibodies can be prepared using a wide variety of techniques known in the art including the use of hybridoma, recombinant, and phage display technologies, or a combination thereof. For example, monoclonal antibodies can be produced using hybridoma techniques including those known in the art and taught, for example, in Harlow et al., Antibodies: A Laboratory Manual, (Cold Spring Harbor Laboratory Press, 2nd ed. 1988) Hammerling, et al., in: Monoclonal Antibodies and T-Cell Hybridomas 563-681 (Elsevier, N.Y., 1981) (said references incorporated by reference in their entireties). The term “monoclonal antibody” as used herein is not limited to antibodies produced through hybridoma technology. The term “monoclonal antibody” refers to an antibody that is derived from a single clone, including any eukaryotic, prokaryotic, or phage clone, and not the method by which it is produced.

[0393] Methods for producing and screening for specific antibodies using hybridoma technology are routine and well known in the art and are discussed in detail in the Examples described herein. In a non-limiting example, mice can be immunized with a polypeptide of the invention or a cell expressing such peptide. Once an immune response is detected, e.g., antibodies specific for the antigen are detected in the mouse serum, the mouse spleen is harvested and splenocytes isolated. The splenocytes are then fused by well known techniques to any suitable myeloma cells, for example cells from cell line SP20 available from the ATCC. Hybridomas are selected and cloned by limited dilution. The hybridoma clones are then assayed by methods known in the art for cells that secrete antibodies capable of binding a polypeptide of the invention. Ascites fluid, which generally contains high levels of antibodies, can be generated by immunizing mice with positive hybridoma clones.

[0394] Accordingly, the present invention provides methods of generating monoclonal antibodies as well as antibodies produced by the method comprising culturing a hybridoma cell secreting an antibody of the invention wherein, preferably, the hybridoma is generated by fusing splenocytes isolated from a mouse immunized with an antigen of the invention with myeloma cells and then screening the hybridomas resulting from the fusion for hybridoma clones that secrete an antibody able to bind a polypeptide of the invention.

[0395] Antibody fragments which recognize specific epitopes may be generated by known techniques. For example, Fab and F(ab′)2 fragments of the invention may be produced by proteolytic cleavage of immunoglobulin molecules, using enzymes such as papain (to produce Fab fragments) or pepsin (to produce F(ab′)2 fragments). F(ab′)2 fragments contain the variable region, the light chain constant region and the CH1 domain of the heavy chain.

[0396] For example, the antibodies of the present invention can also be generated using various phage display methods known in the art. In phage display methods, functional antibody domains are displayed on the surface of phage particles which carry the polynucleotide sequences encoding them. In a particular embodiment, such phage can be utilized to display antigen binding domains expressed from a repertoire or combinatorial antibody library (e.g., human or murine). Phage expressing an antigen binding domain that binds the antigen of interest can be selected or identified with antigen, e.g., using labeled antigen or antigen bound or captured to a solid surface or bead. Phage used in these methods are typically filamentous phage including fd and M13 binding domains expressed from phage with Fab, Fv or disulfide stabilized Fv antibody domains recombinantly fused to either the phage gene III or gene VIII protein. Examples of phage display methods that can be used to make the antibodies of the present invention include those disclosed in Brinkman et al., J. Immunol. Methods 182:41-50 (1995); Ames et al., J. Immunol. Methods 184:177-186 (1995); Kettleborough et al., Eur. J. Immunol. 24:952-958 (1994); Persic et al., Gene 187 9-18 (1997); Burton et al., Advances in Immunology 57:191-280 (1994); PCT application No. PCT/GB91/01134; PCT publications WO 90/02809; WO 91/10737; WO 92/01047; WO 92/18619; WO 93/11236; WO 95/15982; WO 95/20401; and U.S. Pat. Nos. 5,698,426; 5,223,409; 5,403,484; 5,580,717; 5,427,908; 5,750,753; 5,821,047; 5,571,698; 5,427,908; 5,516,637; 5,780,225; 5,658,727; 5,733,743 and 5,969,108; each of which is incorporated herein by reference in its entirety.

[0397] As described in the above references, after phage selection, the antibody coding regions from the phage can be isolated and used to generate whole antibodies, including human antibodies, or any other desired antigen binding fragment, and expressed in any desired host, including mammalian cells, insect cells, plant cells, yeast, and bacteria, e.g., as described in detail below. For example, techniques to recombinantly produce Fab, Fab′ and F(ab′)2 fragments can also be employed using methods known in the art such as those disclosed in PCT publication WO 92/22324; Mullinax et al., BioTechniques 12(6):864-869 (1992); and Sawai et al., AJRI 34:26-34 (1995); and Better et al., Science 240:1041-1043 (1988) (said references incorporated by reference in their entireties). Examples of techniques which can be used to produce single-chain Fvs and antibodies include those described in U.S. Pat. Nos. 4,946,778 and 5,258,498; Huston et al., Methods in Enzymology 203:46-88 (1991); Shu et al., PNAS 90:7995-7999 (1993); and Skerra et al., Science 240:1038-1040 (1988).

[0398] For some uses, including in vivo use of antibodies in humans and in vitro detection assays, it may be preferable to use chimeric, humanized, or human antibodies. A chimeric antibody is a molecule in which different portions of the antibody are derived from different animal species, such as antibodies having a variable region derived from a murine monoclonal antibody and a human immunoglobulin constant region. Methods for producing chimeric antibodies are known in the art. See e.g., Morrison, Science 229:1202 (1985); Oi et al., BioTechniques 4:214 (1986); Gillies et al., (1989) J. Immunol. Methods 125:191-202; Cabilly et al., Taniguchi et al., EP 171496; Morrison et al., EP 173494; Neuberger et al., WO 8601533; Robinson et al., WO 8702671; Boulianne et al., Nature 312:643 (1984); Neuberger et al., Nature 314:268 (1985); U.S. Pat. Nos. 5,807,715; 4,816,567; and 4,816397, which are incorporated herein by reference in their entirety. Humanized antibodies are antibody molecules from non-human species antibody that binds the desired antigen having one or more complementarity determining regions (CDRs) from the non-human species and a framework regions from a human immunoglobulin molecule. Often, framework residues in the human framework regions will be substituted with the corresponding residue from the CDR donor antibody to alter, preferably improve, antigen binding. These framework substitutions are identified by methods well known in the art, e.g., by modeling of the interactions of the CDR and framework residues to identify framework residues important for antigen binding and sequence comparison to identify unusual framework residues at particular positions. (See, e.g., Queen et al., U.S. Pat. No. 5,585,089; Riechmann et al., Nature 332:323 (1988), which are incorporated herein by reference in their entireties.) Antibodies can be humanized using a variety of techniques known in the art including, for example, CDR-grafting (EP 239,400; PCT publication WO 91/09967; U.S. Pat. Nos. 5,225,539; 5,530,101; and 5,585,089), veneering or resurfacing (EP 592,106; EP 519,596; Padlan, Molecular Immunology 28(4/5):489-498 (1991); Studnicka et al., Protein Engineering 7(6):805-814 (1994); Roguska. et al., PNAS 91:969-973 (1994)), and chain shuffling (U.S. Pat. No. 5,565,332). Generally, a humanized antibody has one or more amino acid residues introduced into it from a source that is non-human. These non-human amino acid residues are often referred to as “import” residues, which are typically taken from an “import” variable domain. Humanization can be essentially performed following the methods of Winter and co-workers (Jones et al., Nature, 321:522-525 (1986); Reichmann et al., Nature, 332:323-327 (1988); Verhoeyen et al., Science, 239:1534-1536 (1988), by substituting rodent CDRs or CDR sequences for the corresponding sequences of a human antibody. Accordingly, such “humanized” antibodies are chimeric antibodies (U.S. Pat. No. 4,816,567), wherein substantially less than an intact human variable domain has been substituted by the corresponding sequence from a non-human species. In practice, humanized antibodies are typically human antibodies in which some CDR residues and possible some FR residues are substituted from analogous sites in rodent antibodies.

[0399] In general, the humanized antibody will comprise substantially all of at least one, and typically two, variable domains, in which all or substantially all of the CDR regions correspond to those of a non-human immunoglobulin and all or substantially all of the FR regions are those of a human immunoglobulin consensus sequence. The humanized antibody optimally also will comprise at least a portion of an immunoglobulin constant region (Fc), typically that of a human immunoglobulin (Jones et al., Nature, 321:522-525 (1986); Riechmann et al., Nature 332:323-329 (1988)1 and Presta, Curr. Op. Struct. Biol., 2:593-596 (1992).

[0400] Completely human antibodies are particularly desirable for therapeutic treatment of human patients. Human antibodies can be made by a variety of methods known in the art including phage display methods described above using antibody libraries derived from human immunoglobulin sequences. See also, U.S. Pat. Nos. 4,444,887 and 4,716,111; and PCT publications WO 98/46645, WO 98/50433, WO 98/24893, WO 98/16654, WO 96/34096, WO 96/33735, and WO 91/10741; each of which is incorporated herein by reference in its entirety. The techniques of cole et al., and Boerder et al., are also available for the preparation of human monoclonal antibodies (cole et al., Monoclonal Antibodies and Cancer Therapy, Alan R. Riss, (1985); and Boerner et al., J. Immunol., 147(1):86-95, (1991)).

[0401] Human antibodies can also be produced using transgenic mice which are incapable of expressing functional endogenous immunoglobulins, but which can express human immunoglobulin genes. For example, the human heavy and light chain immunoglobulin gene complexes may be introduced randomly or by homologous recombination into mouse embryonic stem cells. Alternatively, the human variable region, constant region, and diversity region may be introduced into mouse embryonic stem cells in addition to the human heavy and light chain genes. The mouse heavy and light chain immunoglobulin genes may be rendered non-functional separately or simultaneously with the introduction of human immunoglobulin loci by homologous recombination. In particular, homozygous deletion of the JH region prevents endogenous antibody production. The modified embryonic stem cells are expanded and microinjected into blastocysts to produce chimeric mice. The chimeric mice are then bred to produce homozygous offspring which express human antibodies. The transgenic mice are immunized in the normal fashion with a selected antigen, e.g., all or a portion of a polypeptide of the invention. Monoclonal antibodies directed against the antigen can be obtained from the immunized, transgenic mice using conventional hybridoma technology. The human immunoglobulin transgenes harbored by the transgenic mice rearrange during B cell differentiation, and subsequently undergo class switching and somatic mutation. Thus, using such a technique, it is possible to produce therapeutically useful IgG, IgA, IgM and IgE antibodies. For an overview of this technology for producing human antibodies, see Lonberg and Huszar, Int. Rev. Immunol. 13:65-93 (1995). For a detailed discussion of this technology for producing human antibodies and human monoclonal antibodies and protocols for producing such antibodies, see, e.g., PCT publications WO 98/24893; WO 92/01047; WO 96/34096; WO 96/33735; European Patent No. 0 598 877; U.S. Pat. Nos. 5,413,923; 5,625,126; 5,633,425; 5,569,825; 5,661,016; 5,545,806; 5,814,318; 5,885,793; 5,916,771; and 5,939,598, which are incorporated by reference herein in their entirety. In addition, companies such as Abgenix, Inc. (Freemont, Calif.), Genpharm (San Jose, Calif.), and Medarex, Inc. (Princeton, N.J.) can be engaged to provide human antibodies directed against a selected antigen using technology similar to that described above.

[0402] Similarly, human antibodies can be made by introducing human immunoglobulin loci into transgenic animals, e.g., mice in which the endogenous immunoglobulin genes have been partially or completely inactivated. Upon challenge, human antibody production is observed, which closely resembles that seen in humans in all respects, including gene rearrangement, assembly, and creation of an antibody repertoire. This approach is described, for example, in U.S. Pat. Nos. 5,545,807; 5,545,806; 5,569,825; 5,625,126; 5,633,425; 5,661,106, and in the following scientific publications: Marks et al., Biotechnol., 10:779-783 (1992); Lonberg et al., Nature 368:856-859 (1994); Fishwild et al., Nature Biotechnol., 14:845-51 (1996); Neuberger, Nature Biotechnol., 14:826 (1996); Lonberg and Huszer, Intern. Rev. Immunol., 13:65-93 (1995).

[0403] Completely human antibodies which recognize a selected epitope can be generated using a technique referred to as “guided selection.” In this approach a selected non-human monoclonal antibody, e.g., a mouse antibody, is used to guide the selection of a completely human antibody recognizing the same epitope. (Jespers et al., Bio/technology 12:899-903 (1988)).

[0404] Further, antibodies to the polypeptides of the invention can, in turn, be utilized to generate anti-idiotype antibodies that “mimic” polypeptides of the invention using techniques well known to those skilled in the art. (See, e.g., Greenspan & Bona, FASEB J. 7(5):437-444; (1989) and Nissinoff, J. Immunol. 147(8):2429-2438 (1991)). For example, antibodies which bind to and competitively inhibit polypeptide multimerization and/or binding of a polypeptide of the invention to a ligand can be used to generate anti-idiotypes that “mimic” the polypeptide multimerization and/or binding domain and, as a consequence, bind to and neutralize polypeptide and/or its ligand. Such neutralizing anti-idiotypes or Fab fragments of such anti-idiotypes can be used in therapeutic regimens to neutralize polypeptide ligand. For example, such anti-idiotypic antibodies can be used to bind a polypeptide of the invention and/or to bind its ligands/receptors, and thereby block its biological activity.

[0405] Such anti-idiotypic antibodies capable of binding to the polymorphic polypeptide can be produced in a two-step procedure. Such a method makes use of the fact that antibodies are themselves antigens, and therefore, it is possible to obtain an antibody that binds to a second antibody. In accordance with this method, protein specific antibodies are used to immunize an animal, preferably a mouse. The splenocytes of such an animal are then used to produce hybridoma cells, and the hybridoma cells are screened to identify clones that produce an antibody whose ability to bind to the protein-specific antibody can be blocked by the polypeptide. Such antibodies comprise anti-idiotypic antibodies to the protein-specific antibody and can be used to immunize an animal to induce formation of further protein-specific antibodies.

[0406] The antibodies of the present invention may be bispecific antibodies. Bispecific antibodies are monoclonal, Preferably human or humanized, antibodies that have binding specificities for at least two different antigens. In the present invention, one of the binding specificities may be directed towards a polypeptide of the present invention, the other may be for any other antigen, and preferably for a cell-surface protein, receptor, receptor subunit, tissue-specific antigen, virally derived protein, virally encoded envelope protein, bacterially derived protein, or bacterial surface protein, etc.

[0407] Methods for making bispecific antibodies are known in the art. Traditionally, the recombinant production of bispecific antibodies is based on the co-expression of two immunoglobulin heavy-chain/light-chain pairs, where the two heavy chains have different specificities (Milstein and Cuello, Nature, 305:537-539 (1983). Because of the random assortment of immunoglobulin heavy and light chains, these hybridomas (quadromas) produce a potential mixture of ten different antibody molecules, of which only one has the correct bispecific structure. The purification of the correct molecule is usually accomplished by affinity chromatography, steps. Similar procedures are disclosed in WO 93/08829, published 13 May 1993, and in Traunecker et al., EMBO J., 10:3655-3659 (1991).

[0408] Antibody variable domains with the desired binding specificities (antibody-antigen combining sites) can be fused to immunoglobulin constant domain sequences. The fusion preferably is with an immunoglobulin heavy-chain constant domain, comprising at least part of the hinge, CH2, and CH3 regions. It is preferred to have the first heavy-chain constant region (CH1) containing the site necessary for light-chain binding present in at least one of the fusions. DNAs encoding the immunoglobulin heavy-chain fusions and, if desired, the immunoglobulin light chain, are inserted into separate expression vectors, and are co-transformed into a suitable host organism. For further details of generating bispecific antibodies see, for example Suresh et al., Meth. In Enzym., 121:210 (1986).

[0409] Heteroconjugate antibodies are also contemplated by the present invention. Heteroconjugate antibodies are composed of two covalently joined antibodies. Such antibodies have, for example, been proposed to target immune system cells to unwanted cells (U.S. Pat. No. 4,676,980), and for the treatment of HIV infection (WO 91/00360; WO 92/20373; and EP03089). It is contemplated that the antibodies may be prepared in vitro using known methods in synthetic protein chemistry, including those involving crosslinking agents. For example, immunotoxins may be constructed using a disulfide exchange reaction or by forming a thioester bond. Examples of suitable reagents for this purpose include iminothiolate and methyl-4-mercaptobutyrimidate and those disclosed, for example, in U.S. Pat. No. 4,676,980.

### Polynucleotides Encoding Antibodies

[0410] The invention further provides polynucleotides comprising a nucleotide sequence encoding an antibody of the invention and fragments thereof. The invention also encompasses polynucleotides that hybridize under stringent or lower stringency hybridization conditions, e.g., as defined supra, to polynucleotides that encode an antibody, preferably, that specifically binds to a polypeptide of the invention, preferably, an antibody that binds to a polypeptide having the amino acid sequence of SEQ ID NO:6, 8, 10, 12, 14, 16, 18, 20, 22, 24, 26, 28, 30, 32, 34, 36, 38, 40, 42, 44, 46, 48, 50, and/or 604.

[0411] The polynucleotides may be obtained, and the nucleotide sequence of the polynucleotides determined, by any method known in the art. For example, if the nucleotide sequence of the antibody is known, a polynucleotide encoding the antibody may be assembled from chemically synthesized oligonucleotides (e.g., as described in Kutmeier et al., BioTechniques 17:242 (1994)), which, briefly, involves the synthesis of overlapping oligonucleotides containing portions of the sequence encoding the antibody, annealing and ligating of those oligonucleotides, and then amplification of the ligated oligonucleotides by PCR.

[0412] Alternatively, a polynucleotide encoding an antibody may be generated from nucleic acid from a suitable source. If a clone containing a nucleic acid encoding a particular antibody is not available, but the sequence of the antibody molecule is known, a nucleic acid encoding the immunoglobulin may be chemically synthesized or obtained from a suitable source (e.g., an antibody cDNA library, or a cDNA library generated from, or nucleic acid, preferably poly A+RNA, isolated from, any tissue or cells expressing the antibody, such as hybridoma cells selected to express an antibody of the invention) by PCR amplification using synthetic primers hybridizable to the 3′ and 5′ ends of the sequence or by cloning using an oligonucleotide probe specific for the particular gene sequence to identify, e.g., a cDNA clone from a cDNA library that encodes the antibody. Amplified nucleic acids generated by PCR may then be cloned into replicable cloning vectors using any method well known in the art.

[0413] Once the nucleotide sequence and corresponding amino acid sequence of the antibody is determined, the nucleotide sequence of the antibody may be manipulated using methods well known in the art for the manipulation of nucleotide sequences, e.g., recombinant DNA techniques, site directed mutagenesis, PCR, etc. (see, for example, the techniques described in Sambrook et al., 1990, Molecular Cloning, A Laboratory Manual, 2d Ed., Cold Spring Harbor Laboratory, Cold Spring Harbor, N.Y. and Ausubel et al., eds., 1998, Current Protocols in Molecular Biology, John Wiley & Sons, NY, which are both incorporated by reference herein in their entireties ), to generate antibodies having a different amino acid sequence, for example to create amino acid substitutions, deletions, and/or insertions.

[0414] In a specific embodiment, the amino acid sequence of the heavy and/or light chain variable domains may be inspected to identify the sequences of the complementarity determining regions (CDRs) by methods that are well know in the art, e.g., by comparison to known amino acid sequences of other heavy and light chain variable regions to determine the regions of sequence hypervariability. Using routine recombinant DNA techniques, one or more of the CDRs may be inserted within framework regions, e.g., into human framework regions to humanize a non-human antibody, as described supra. The framework regions may be naturally occurring or consensus framework regions, and preferably human framework regions (see, e.g., Chothia et al., J. Mol. Biol. 278: 457-479 (1998) for a listing of human framework regions). Preferably, the polynucleotide generated by the combination of the framework regions and CDRs encodes an antibody that specifically binds a polypeptide of the invention. Preferably, as discussed supra, one or more amino acid substitutions may be made within the framework regions, and, preferably, the amino acid substitutions improve binding of the antibody to its antigen. Additionally, such methods may be used to make amino acid substitutions or deletions of one or more variable region cysteine residues participating in an intrachain disulfide bond to generate antibody molecules lacking one or more intrachain disulfide bonds. Other alterations to the polynucleotide are encompassed by the present invention and within the skill of the art.

[0415] In addition, techniques developed for the production of “chimeric antibodies” (Morrison et al., Proc. Natl. Acad. Sci. 81:851-855 (1984); Neuberger et al., Nature 312:604-608 (1984); Takeda et al., Nature 314:452-454 (1985)) by splicing genes from a mouse antibody molecule of appropriate antigen specificity together with genes from a human antibody molecule of appropriate biological activity can be used. As described supra, a chimeric antibody is a molecule in which different portions are derived from different animal species, such as those having a variable region derived from a murine mAb and a human immunoglobulin constant region, e.g., humanized antibodies.

[0416] Alternatively, techniques described for the production of single chain antibodies (U.S. Pat. No. 4,946,778; Bird, Science 242:423-42 (1988); Huston et al., Proc. Natl. Acad. Sci. USA 85:5879-5883 (1988); and Ward et al., Nature 334:544-54 (1989)) can be adapted to produce single chain antibodies. Single chain antibodies are formed by linking the heavy and light chain fragments of the Fv region via an amino acid bridge, resulting in a single chain polypeptide. Techniques for the assembly of functional Fv fragments in E. coli may also be used (Skerra et al., Science 242:1038-1041 (1988)).

[0417] More preferably, a clone encoding an antibody of the present invention may be obtained according to the method described in the Example section herein.

### Methods of Producing Antibodies

[0418] The antibodies of the invention can be produced by any method known in the , art for the synthesis of antibodies, in particular, by chemical synthesis or preferably, by recombinant expression techniques.

[0419] Recombinant expression of an antibody of the invention, or fragment, derivative or analog thereof, (e.g., a heavy or light chain of an antibody of the invention or a single chain antibody of the invention), requires construction of an expression vector containing a polynucleotide that encodes the antibody. Once a polynucleotide encoding an antibody molecule or a heavy or light chain of an antibody, or portion thereof (preferably containing the heavy or light chain variable domain), of the invention has been obtained, the vector for the production of the antibody molecule may be produced by recombinant DNA technology using techniques well known in the art. Thus, methods for preparing a protein by expressing a polynucleotide containing an antibody encoding nucleotide sequence are described herein. Methods which are well known to those skilled in the art can be used to construct expression vectors containing antibody coding sequences and appropriate transcriptional and translational control signals. These methods include, for example, in vitro recombinant DNA techniques, synthetic techniques, and in vivo genetic recombination. The invention, thus, provides replicable vectors comprising a nucleotide sequence encoding an antibody molecule of the invention, or a heavy or light chain thereof, or a heavy or light chain variable domain, operably linked to a promoter. Such vectors may include the nucleotide sequence encoding the constant region of the antibody molecule (see, e.g., PCT Publication WO 86/05807; PCT Publication WO 89/01036; and U.S. Pat. No. 5,122,464) and the variable domain of the antibody may be cloned into such a vector for expression of the entire heavy or light chain.

[0420] The expression vector is transferred to a host cell by conventional techniques and the transfected cells are then cultured by conventional techniques to produce an antibody of the invention. Thus, the invention includes host cells containing a polynucleotide encoding an antibody of the invention, or a heavy or light chain thereof, or a single chain antibody of the invention, operably linked to a heterologous promoter. In preferred embodiments for the expression of double-chained antibodies, vectors encoding both the heavy and light chains may be co-expressed in the host cell for expression of the entire immunoglobulin molecule, as detailed below.

[0421] A variety of host-expression vector systems may be utilized to express the antibody molecules of the invention. Such host-expression systems represent vehicles by which the coding sequences of interest may be produced and subsequently purified, but also represent cells which may, when transformed or transfected with the appropriate nucleotide coding sequences, express an antibody molecule of the invention in situ. These include but are not limited to microorganisms such as bacteria (e.g., E. coli, B. subtilis) transformed with recombinant bacteriophage DNA, plasmid DNA or cosmid DNA expression vectors containing antibody coding sequences; yeast (e.g., Saccharomyces, Pichia) transformed with recombinant yeast expression vectors containing antibody coding sequences; insect cell systems infected with recombinant virus expression vectors (e.g., baculovirus) containing antibody coding sequences; plant cell systems infected with recombinant virus expression vectors (e.g., cauliflower mosaic virus, CaMV; tobacco mosaic virus, TMV) or transformed with recombinant plasmid expression vectors (e.g., Ti plasmid) containing antibody coding sequences; or mammalian cell systems (e.g., COS, CHO, BHK, 293, 3T3 cells) harboring recombinant expression constructs containing promoters derived from the genome of mammalian cells (e.g., metallothionein promoter) or from mammalian viruses (e.g., the adenovirus late promoter; the vaccinia virus 7.5K promoter). Preferably, bacterial cells such as Escherichia coli, and more preferably, eukaryotic cells, especially for the expression of whole recombinant antibody molecule, are used for the expression of a recombinant antibody molecule. For example, mammalian cells such as Chinese hamster ovary cells (CHO), in conjunction with a vector such as the major intermediate early gene promoter element from human cytomegalovirus is an effective expression system for antibodies (Foecking et al., Gene 45:101 (1986); Cockett et al., Bio/Technology 8:2 (1990)).

[0422] In bacterial systems, a number of expression vectors may be advantageously selected depending upon the use intended for the antibody molecule being expressed. For example, when a large quantity of such a protein is to be produced, for the generation of pharmaceutical compositions of an antibody molecule, vectors which direct the expression of high levels of fusion protein products that are readily purified may be desirable. Such vectors include, but are not limited, to the E. coli expression vector pUR278 (Ruther et al., EMBO J. 2:1791 (1983)), in which the antibody coding sequence may be ligated individually into the vector in frame with the lac Z coding region so that a fusion protein is produced; pIN vectors (Inouye & Inouye, Nucleic Acids Res. 13:3101-3109 (1985); Van Heeke & Schuster, J. Biol. Chem. 24:5503-5509 (1989)); and the like. pGEX vectors may also be used to express foreign polypeptides as fusion proteins with glutathione S-transferase (GST). In general, such fusion proteins are soluble and can easily be purified from lysed cells by adsorption and binding to matrix glutathione-agarose beads followed by elution in the presence of free glutathione. The pGEX vectors are designed to include thrombin or factor Xa protease cleavage sites so that the cloned target gene product can be released from the GST moiety.

[0423] In an insect system, Autographa californica nuclear polyhedrosis virus (AcNPV) is used as a vector to express foreign genes. The virus grows in Spodoptera frugiperda cells. The antibody coding sequence may be cloned individually into non-essential regions (for example the polyhedrin gene) of the virus and placed under control of an AcNPV promoter (for example the polyhedrin promoter).

[0424] In mammalian host cells, a number of viral-based expression systems may be utilized. In cases where an adenovirus is used as an expression vector, the antibody coding sequence of interest may be ligated to an adenovirus transcription/translation control complex, e.g., the late promoter and tripartite leader sequence. This chimeric gene may then be inserted in the adenovirus genome by in vitro or in vivo recombination. Insertion in a non-essential region of the viral genome (e.g., region E1 or E3) will result in a recombinant virus that is viable and capable of expressing the antibody molecule in infected hosts. (e.g., see Logan & Shenk, Proc. Natl. Acad. Sci. USA 81:355-359 (1984)). Specific initiation signals may also be required for efficient translation of inserted antibody coding sequences. These signals include the ATG initiation codon and adjacent sequences. Furthermore, the initiation codon must be in phase with the reading frame of the desired coding sequence to ensure translation of the entire insert. These exogenous translational control signals and initiation codons can be of a variety of origins, both natural and synthetic. The efficiency of expression may be enhanced by the inclusion of appropriate transcription enhancer elements, transcription terminators, etc. (see Bittner et al., Methods in Enzymol. 153:51-544 (1987)).

[0425] In addition, a host cell strain may be chosen which modulates the expression of the inserted sequences, or modifies and processes the gene product in the specific fashion desired. Such modifications (e.g., glycosylation) and processing (e.g., cleavage) of protein products may be important for the function of the protein. Different host cells have characteristic and specific mechanisms for the post-translational processing and modification of proteins and gene products. Appropriate cell lines or host systems can be chosen to ensure the correct modification and processing of the foreign protein expressed. To this end, eukaryotic host cells which possess the cellular machinery for proper processing of the primary transcript, glycosylation, and phosphorylation of the gene product may be used. Such mammalian host cells include but are not limited to CHO, VERY, BHK, Hela, COS, MDCK, 293, 3T3, WT38, and in particular, breast cancer cell lines such as, for example, BT483, Hs578T, HTB2, BT20 and T47D, and normal mammary gland cell line such as, for example, CRL7030 and Hs578Bst.

[0426] For long-term, high-yield production of recombinant proteins, stable expression is preferred. For example, cell lines which stably express the antibody molecule may be engineered. Rather than using expression vectors which contain viral origins of replication, host cells can be transformed with DNA controlled by appropriate expression control elements (e.g., promoter, enhancer, sequences, transcription terminators, polyadenylation sites, etc.), and a selectable marker. Following the introduction of the foreign DNA, engineered cells may be allowed to grow for 1-2 days in an enriched media, and then are switched to a selective media. The selectable marker in the recombinant plasmid confers resistance to the selection and allows cells to stably integrate the plasmid into their chromosomes and grow to form foci which in turn can be cloned and expanded into cell lines. This method may advantageously be used to engineer cell lines which express the antibody molecule. Such engineered cell lines may be particularly useful in screening and evaluation of compounds that interact directly or indirectly with the antibody molecule.

[0427] A number of selection systems may be used, including but not limited to the herpes simplex virus thymidine kinase (Wigler et al., Cell 11:223 (1977)), hypoxanthine-guanine phosphoribosyltransferase (Szybalska & Szybalski, Proc. Natl. Acad. Sci. USA 48:202 (1992)), and adenine phosphoribosyltransferase (Lowy et al., Cell 22:817 (1980)) genes can be employed in tk-, hgprt- or aprt- cells, respectively. Also, antimetabolite resistance can be used as the basis of selection for the following genes: dhfr, which confers resistance to methotrexate (Wigler et al., Natl. Acad. Sci. USA 77:357 (1980); O'Hare et al., Proc. Natl. Acad. Sci. USA 78:1527 (1981)); gpt, which confers resistance to mycophenolic acid (Mulligan & Berg, Proc. Natl. Acad. Sci. USA 78:2072 (1981)); neo, which confers resistance to the aminoglycoside G-418 Clinical Pharmacy 12:488-505; Wu and Wu, Biotherapy 3:87-95 (1991); Tolstoshev, Ann. Rev. Pharmacol. Toxicol. 32:573-596 (1993); Mulligan, Science 260:926-932 (1993); and Morgan and Anderson, Ann. Rev. Biochem. 62:191-217 (1993); May, 1993, TIB TECH 11(5):155-215); and hygro, which confers resistance to hygromycin (Santerre et al., Gene 30:147 (1984)). Methods commonly known in the art of recombinant DNA technology may be routinely applied to select the desired recombinant clone, and such methods are described, for example, in Ausubel et al. (eds.), Current Protocols in Molecular Biology, John Wiley & Sons, NY (1993); Kriegler, Gene Transfer and Expression, A Laboratory Manual, Stockton Press, NY (1990); and in Chapters 12 and 13, Dracopoli et al. (eds), Current Protocols in Human Genetics, John Wiley & Sons, NY (1994); Colberre-Garapin et al., J. Mol. Biol. 150:1 (1981), which are incorporated by reference herein in their entireties.

[0428] The expression levels of an antibody molecule can be increased by vector amplification (for a review, see Bebbington and Hentschel, The use of vectors based on gene amplification for the expression of cloned genes in mammalian cells in DNA cloning, Vol.3. (Academic Press, New York, 1987)). When a marker in the vector system expressing antibody is amplifiable, increase in the level of inhibitor present in culture of host cell will increase the number of copies of the marker gene. Since the amplified region is associated with the antibody gene, production of the antibody will also increase (Crouse et al., Mol. Cell. Biol. 3:257 (1983)).

[0429] The host cell may be co-transfected with two expression vectors of the invention, the first vector encoding a heavy chain derived polypeptide and the second vector encoding a light chain derived polypeptide. The two vectors may contain identical selectable markers which enable equal expression of heavy and light chain polypeptides. Alternatively, a single vector may be used which encodes, and is capable of expressing, both heavy and light chain polypeptides. In such situations, the light chain should be placed before the heavy chain to avoid an excess of toxic free heavy chain (Proudfoot, Nature 322:52 (1986); Köhler, Proc. Natl. Acad. Sci. USA 77:2197 (1980)). The coding sequences for the heavy and light chains may comprise cDNA or genomic DNA.

[0430] Once an antibody molecule of the invention has been produced by an animal, chemically synthesized, or recombinantly expressed, it may be purified by any method known in the art for purification of an immunoglobulin molecule, for example, by chromatography (e.g., ion exchange, affinity, particularly by affinity for the specific antigen after Protein A, and sizing column chromatography), centrifugation, differential solubility, or by any other standard technique for the purification of proteins. In addition, the antibodies of the present invention or fragments thereof can be fused to heterologous polypeptide sequences described herein or otherwise known in the art, to facilitate purification.

[0431] The present invention encompasses antibodies recombinantly fused or chemically conjugated (including both covalently and non-covalently conjugations) to a polypeptide (or portion thereof, preferably at least 10, 20, 30, 40, 50, 60, 70, 80, 90 or 100 amino acids of the polypeptide) of the present invention to generate fusion proteins. The fusion does not necessarily need to be direct, but may occur through linker sequences. The antibodies may be specific for antigens other than polypeptides (or portion thereof, preferably at least 10, 20, 30, 40, 50, 60, 70, 80, 90 or 100 amino acids of the polypeptide) of the present invention. For example, antibodies may be used to target the polypeptides of the present invention to particular cell types, either in vitro or in vivo, by fusing or conjugating the polypeptides of the present invention to antibodies specific for particular cell surface receptors. Antibodies fused or conjugated to the polypeptides of the present invention may also be used in in vitro immunoassays and purification methods using methods known in the art. See e.g., Harbor et al., supra, and PCT publication WO 93/21232; EP 439,095; Naramura et al., Immunol. Lett. 39:91-99 (1994); U.S. Pat. No. 5,474,981; Gillies et al., PNAS 89:1428-1432 (1992); Fell et al., J. Immunol. 146:2446-2452(1991), which are incorporated by reference in their entireties.

[0432] The present invention further includes compositions comprising the polypeptides of the present invention fused or conjugated to antibody domains other than the variable regions. For example, the polypeptides of the present invention may be fused or conjugated to an antibody Fc region, or portion thereof. The antibody portion fused to a polypeptide of the present invention may comprise the constant region, hinge region, CH1 domain, CH2 domain, and CH3 domain or any combination of whole domains or portions thereof. The polypeptides may also be fused or conjugated to the above antibody portions to form multimers. For example, Fc portions fused to the polypeptides of the present invention can form dimers through disulfide bonding between the Fc portions. Higher multimeric forms can be made by fusing the polypeptides to portions of IgA and IgM. Methods for fusing or conjugating the polypeptides of the present invention to antibody portions are known in the art. See, e.g., U.S. Pat. Nos. 5,336,603; 5,622,929; 5,359,046; 5,349,053; 5,447,851; 5,112,946; EP 307,434; EP 367,166; PCT publications WO 96/04388; WO 91/06570; Ashkenazi et al., Proc. Natl. Acad. Sci. USA 88:10535-10539 (1991); Zheng et al., J. Inmunol. 154:5590-5600 (1995); and Vil et al., Proc. Natl. Acad. Sci. USA 89:11337-11341(1992) (said references incorporated by reference in their entireties).

[0433] As discussed, supra, the polypeptides corresponding to a polypeptide, polypeptide fragment, or a variant of SEQ ID NO:6, 8, 10, 12, 14, 16, 18, 20, 22, 24, 26, 28, 30, 32, 34, 36, 38, 40, 42, 44, 46, 48, 50, and/or 604 may be fused or conjugated to the above antibody portions to increase the in vivo half life of the polypeptides or for use in immunoassays using methods known in the art. Further, the polypeptides corresponding to SEQ ID NO:6, 8, 10, 12, 14, 16, 18, 20, 22, 24, 26, 28, 30, 32, 34, 36, 38, 40, 42, 44, 46, 48, 50, and/or 604 may be fused or conjugated to the above antibody portions to facilitate purification. One reported example describes chimeric proteins consisting of the first two domains of the human CD4-polypeptide and various domains of the constant regions of the heavy or light chains of mammalian immunoglobulins. (EP 394,827; Traunecker et al., Nature 331:84-86 (1988). The polypeptides of the present invention fused or conjugated to an antibody having disulfide-linked dimeric structures (due to the IgG) may also be more efficient in binding and neutralizing other molecules, than the monomeric secreted protein or protein fragment alone. (Fountoulakis et al., J. Biochem. 270:3958-3964 (1995)). In many cases, the Fc part in a fusion protein is beneficial in therapy and diagnosis, and thus can result in, for example, improved pharmacokinetic properties. (EP A 232,262). Alternatively, deleting the Fc part after the fusion protein has been expressed, detected, and purified, would be desired. For example, the Fc portion may hinder therapy and diagnosis if the fusion protein is used as an antigen for immunizations. In drug discovery, for example, human proteins, such as hIL-5, have been fused with Fc portions for the purpose of high-throughput screening assays to identify antagonists of hIL-5. (See, Bennett et al., J. Molecular Recognition 8:52-58 (1995); Johanson et al., J. Biol. Chem. 270:9459-9471 (1995).

[0434] Moreover, the antibodies or fragments thereof of the present invention can be fused to marker sequences, such as a peptide to facilitate purification. In preferred embodiments, the marker amino acid sequence is a hexa-histidine peptide, such as the tag provided in a pQE vector (QIAGEN, Inc., 9259 Eton Avenue, Chatsworth, Calif., 91311), among others, many of which are commercially available. As described in Gentz et al., Proc. Natl. Acad. Sci. USA 86:821-824 (1989), for instance, hexa-histidine provides for convenient purification of the fusion protein. Other peptide tags useful for purification include, but are not limited to, the “HA” tag, which corresponds to an epitope derived from the influenza hemagglutinin protein (Wilson et al., Cell 37:767 (1984)) and the “flag” tag.

[0435] The present invention further encompasses antibodies or fragments thereof conjugated to a diagnostic or therapeutic agent. The antibodies can be used diagnostically to, for example, monitor the development or progression of a tumor as part of a clinical testing procedure to, e.g., determine the efficacy of a given treatment regimen. Detection can be facilitated by coupling the antibody to a detectable substance. Examples of detectable substances include various enzymes, prosthetic groups, fluorescent materials, luminescent materials, bioluminescent materials, radioactive materials, positron emitting metals using various positron emission tomographies, and nonradioactive paramagnetic metal ions. The detectable substance may be coupled or conjugated either directly to the antibody (or fragment thereof) or indirectly, through an intermediate (such as, for example, a linker known in the art) using techniques known in the art. See, for example, U.S. Pat. No. 4,741,900 for metal ions which can be conjugated to antibodies for use as diagnostics according to the present invention. Examples of suitable enzymes include horseradish peroxidase, alkaline phosphatase, beta-galactosidase, or acetylcholinesterase; examples of suitable prosthetic group complexes include streptavidin/biotin and avidin/biotin; examples of suitable fluorescent materials include umbelliferone, fluorescein, fluorescein isothiocyanate, rhodamine, dichlorotriazinylaamine fluorescein, dansyl chloride or phycoerythrin; an example of a luminescent material includes luminol; examples of bioluminescent materials include luciferase, luciferin, and aequorin; and examples of suitable radioactive material include 125I, 131I, 111In or 99Tc.

[0436] Further, an antibody or fragment thereof may be conjugated to a therapeutic moiety such as a cytotoxin, e.g., a cytostatic or cytocidal agent, a therapeutic agent or a radioactive metal ion, e.g., alpha-emitters such as, for example, 213Bi. A cytotoxin or cytotoxic agent includes any agent that is detrimental to cells. Examples include paclitaxol, cytochalasin B, gramicidin D, ethidium bromide, emetine, mitomycin, etoposide, tenoposide, vincristine, vinblastine, colchicin, doxorubicin, daunorubicin, dihydroxy anthracin dione, mitoxantrone, mithramycin, actinomycin D, 1-dehydrotestosterone, glucocorticoids, procaine, tetracaine, lidocaine, propranolol, and puromycin and analogs or homologues thereof. Therapeutic agents include, but are not limited to, antimetabolites (e.g., methotrexate, 6-mercaptopurine, 6-thioguanine, cytarabine, 5-fluorouracil decarbazine), alkylating agents (e.g., mechlorethamine, thioepa chlorambucil, melphalan, carmustine (BSNU) and lomustine (CCNU), cyclothosphamide, busulfan, dibromomannitol, streptozotocin, mitomycin C, and cis-dichlorodiamine platinum (TI) (DDP) cisplatin), anthracyclines (e.g., daunorubicin (formerly daunomycin) and doxorubicin), antibiotics (e.g., dactinomycin (formerly actinomycin), bleomycin, mithramycin, and anthramycin (AMC)), and anti-mitotic agents (e.g., vincristine and vinblastine).

[0437] The conjugates of the invention can be used for modifying a given biological response, the therapeutic agent or drug moiety is not to be construed as limited to classical chemical therapeutic agents. For example, the drug moiety may be a protein or polypeptide possessing a desired biological activity. Such proteins may include, for example, a toxin such as abrin, ricin A, pseudomonas exotoxin, or diphtheria toxin; a protein such as tumor necrosis factor, a-interferon, β-interferon, nerve growth factor, platelet derived growth factor, tissue plasminogen activator, an apoptotic agent, e.g., TNF-alpha, TNF-beta, AIM I (See, International Publication No. WO 97/33899), AIM II (See, International Publication No. WO 97/34911), Fas Ligand (Takahashi et al., Int. Immunol., 6:1567-1574 (1994)), VEGI (See, International Publication No. WO 99/23105), a thrombotic agent or an anti-angiogenic agent, e.g., angiostatin or endostatin; or, biological response modifiers such as, for example, lymphokines, interleukin-1 (“IL-1”), interleukin-2 (“IL-2”), interleukin-6 (“IL-6”), granulocyte macrophage colony stimulating factor (“GM-CSF”), granulocyte colony stimulating factor (“G-CSF”), or other growth factors.

[0438] Antibodies may also be attached to solid supports, which are particularly useful for immunoassays or purification of the target antigen. Such solid supports include, but are not limited to, glass, cellulose, polyacrylamide, nylon, polystyrene, polyvinyl chloride or polypropylene.

[0439] Techniques for conjugating such therapeutic moiety to antibodies are well known, see, e.g., Arnon et al., “Monoclonal Antibodies For Immunotargeting Of Drugs In Cancer Therapy”, in Monoclonal Antibodies And Cancer Therapy, Reisfeld et al. (eds.), pp. 243-56 (Alan R. Liss, Inc. 1985); Hellstrom et al., “Antibodies For Drug Delivery”, in Controlled Drug Delivery (2nd Ed.), Robinson et al. (eds.), pp. 623-53 (Marcel Dekker, Inc. 1987); Thorpe, “Antibody Carriers Of Cytotoxic Agents In Cancer Therapy: A Review”, in Monoclonal Antibodies '84: Biological And Clinical Applications, Pinchera et al. (eds.), pp. 475-506 (1985); “Analysis, Results, And Future Prospective Of The Therapeutic Use Of Radiolabeled Antibody In Cancer Therapy”, in Monoclonal Antibodies For Cancer Detection And Therapy, Baldwin et al. (eds.), pp. 303-16 (Academic Press 1985), and Thorpe et al., “The Preparation And Cytotoxic Properties Of Antibody-Toxin Conjugates”, Immunol. Rev. 62:119-58 (1982).

[0440] Alternatively, an antibody can be conjugated to a second antibody to form an antibody heteroconjugate as described by Segal in U.S. Pat. No. 4,676,980, which is incorporated herein by reference in its entirety.

[0441] An antibody, with or without a therapeutic moiety conjugated to it, administered alone or in combination with cytotoxic factor(s) and/or cytokine(s) can be used as a therapeutic.

[0442] The present invention also encompasses the creation of synthetic antibodies directed against the polypeptides of the present invention. One example of synthetic antibodies is described in Radrizzani, M., et al., Medicina, (Aires), 59(6):753-8, (1999)). Recently, a new class of synthetic antibodies has been described and are referred to as molecularly imprinted polymers (MIPs) (Semorex, Inc.). Antibodies, peptides, and enzymes are often used as molecular recognition elements in chemical and biological sensors. However, their lack of stability and signal transduction mechanisms limits their use as sensing devices. Molecularly imprinted polymers (MIPs) are capable of mimicking the function of biological receptors but with less stability constraints. Such polymers provide high sensitivity and selectivity while maintaining excellent thermal and mechanical stability. MIPs have the ability to bind to small molecules and to target molecules such as organics and proteins' with equal or greater potency than that of natural antibodies. These “super” MIPs have higher affinities for their target and thus require lower concentrations for efficacious binding.

[0443] During synthesis, the MIPs are imprinted so as to have complementary size, shape, charge and functional groups of the selected target by using the target molecule itself (such as a polypeptide, antibody, etc.), or a substance having a very similar structure, as its “print” or “template.” MIPs can be derivatized with the same reagents afforded to antibodies. For example, fluorescent ‘super’ MIPs can be coated onto beads or wells for use in highly sensitive separations or assays, or for use in high throughput screening of proteins.

[0444] Moreover, MIPs based upon the structure of the polypeptide(s) of the present invention may be useful in screening for compounds that bind to the polypeptide(s) of the invention. Such a MIP would serve the role of a synthetic “receptor” by minimicking the native architecture of the polypeptide. In fact, the ability of a MIP to serve the role of a synthetic receptor has already been demonstrated for the estrogen receptor (Ye, L., Yu, Y., Mosbach, K, Analyst., 126(6):760-5, (2001); Dickert, F, L., Hayden, O., Halikias, K, P, Analyst., 126(6):766-71, (2001)). A synthetic receptor may either be mimicked in its entirety (e.g., as the entire protein), or mimicked as a series of short peptides corresponding to the protein (Rachkov, A., Minoura, N, Biochim, Biophys, Acta., 1544(1-2):255-66, (2001)). Such a synthetic receptor MIPs may be employed in any one or more of the screening methods described elsewhere herein.

[0445] MIPs have also been shown to be useful in “sensing” the presence of its mimicked molecule (Cheng, Z., Wang, E., Yang, X, Biosens, Bioelectron., 16(3):179-85, (2001); Jenkins, A, L., Yin, R., Jensen, J. L, Analyst., 126(6):798-802, (2001); Jenkins, A, L., Yin, R., Jensen, J. L, Analyst., 126(6):798-802, (2001)). For example, a MIP designed using a polypeptide of the present invention may be used in assays designed to identify, and potentially quantitate, the level of said polypeptide in a sample. Such a MIP may be used as a substitute for any component described in the assays, or kits, provided herein (e.g., ELISA, etc.).

[0446] A number of methods may be employed to create MIPs to a specific receptor, ligand, polypeptide, peptide, organic molecule. Several preferred methods are described by Esteban et al in J. Anal, Chem., 370(7):795-802, (2001), which is hereby incorporated herein by reference in its entirety in addition to any references cited therein. Additional methods are known in the art and are encompassed by the present invention, such as for example, Hart, B, R., Shea, K, J. J. Am. Chem, Soc., 123(9):2072-3, (2001); and Quaglia, M., Chenon, K., Hall, A, J., De, Lorenzi, E., Sellergren, B, J. Am. Chem, Soc., 123(10):2146-54, (2001); which are hereby incorporated by reference in their entirety herein.

### Uses for Antibodies Directed Against Polypeptides of the Invention

[0447] The antibodies of the present invention have various utilities. For example, such antibodies may be used in diagnostic assays to detect the presence or quantification of the polypeptides of the invention in a sample. Such a diagnostic assay may be comprised of at least two steps. The first, subjecting a sample with the antibody, wherein the sample is a tissue (e.g., human, animal, etc.), biological fluid (e.g., blood, urine, sputum, semen, amniotic fluid, saliva, etc.), biological extract (e.g., tissue or cellular homogenate, etc.), a protein microchip (e.g., See Arenkov P, et al., Anal Biochem., 278(2):123-131 (2000)), or a chromatography column, etc. And a second step involving the quantification of antibody bound to the substrate. Alternatively, the method may additionally involve a first step of attaching the antibody, either covalently, electrostatically, or reversibly, to a solid support, and a second step of subjecting the bound antibody to the sample, as defined above and elsewhere herein.

[0448] Various diagnostic assay techniques are known in the art, such as competitive binding assays, direct or indirect sandwich assays and immunoprecipitation assays conducted in either heterogeneous or homogenous phases (Zola, Monoclonal Antibodies: A Manual of Techniques, CRC Press, Inc., (1987), pp147-158). The antibodies used in the diagnostic assays can be labeled with a detectable moiety. The detectable moiety should be capable of producing, either directly or indirectly, a detectable signal. For example, the detectable moiety may be a radioisotope, such as 2H, 14C, 32P, or 125I, a florescent or chemiluminescent compound, such as fluorescein isothiocyanate, rhodamine, or luciferin, or an enzyme, such as alkaline phosphatase, beta-galactosidase, green fluorescent protein, or horseradish peroxidase. Any method known in the art for conjugating the antibody to the detectable moiety may be employed, including those methods described by Hunter et al., Nature, 144:945 (1962); Dafvid et al., Biochem., 13:1014 (1974); Pain et al., J. Immunol. Metho., 40:219(1981); and Nygren, J. Histochem. And Cytochem., 30:407 (1982).

[0449] Antibodies directed against the polypeptides of the present invention are useful for the affinity purification of such polypeptides from recombinant cell culture or natural sources. In this process, the antibodies against a particular polypeptide are immobilized on a suitable support, such as a Sephadex resin or filter paper, using methods well known in the art. The immobilized antibody then is contacted with a sample containing the polypeptides to be purified, and thereafter the support is washed with a suitable solvent that will remove substantially all the material in the sample except for the desired polypeptides, which are bound to the immobilized antibody. Finally, the support is washed with another suitable solvent that will release the desired polypeptide from the antibody.

### Immunophenotyping

[0450] The antibodies of the invention may be utilized for immunophenotyping of cell lines and biological samples. The translation product of the gene of the present invention may be useful as a cell specific marker, or more specifically as a cellular marker that is differentially expressed at various stages of differentiation and/or maturation of particular cell types. Monoclonal antibodies directed against a specific epitope, or combination of epitopes, will allow for the screening of cellular populations expressing the marker. Various techniques can be utilized using monoclonal antibodies to screen for cellular populations expressing the marker(s), and include magnetic separation using antibody-coated magnetic beads, “panning” with antibody attached to a solid matrix (i.e., plate), and flow cytometry (See, e.g., U.S. Pat. No. 5,985,660; and Morrison et al., Cell, 96:737-49 (1999)).

[0451] These techniques allow for the screening of particular populations of cells, such as might be found with hematological malignancies (i.e. minimal residual disease (MRD) in acute leukemic patients) and “non-self” cells in transplantations to prevent Graft-versus-Host Disease (GVHD). Alternatively, these techniques allow for the screening of hematopoietic stem and progenitor cells capable of undergoing proliferation and/or differentiation, as might be found in human umbilical cord blood.

### Assays for Antibody Binding

[0452] The antibodies of the invention may be assayed for immunospecific binding by any method known in the art. The immunoassays which can be used include but are not limited to competitive and non-competitive assay systems using techniques such as western blots, radioimmunoassays, ELISA (enzyme linked immunosorbent assay), “sandwich” immunoassays, immunoprecipitation assays, precipitin reactions, gel diffusion precipitin reactions, immunodiffusion assays, agglutination assays, complement-fixation assays, immunoradiometric assays, fluorescent immunoassays, protein A immunoassays, to name but a few. Such assays are routine and well known in the art (see, e.g., Ausubel et al, eds, 1994, Current Protocols in Molecular Biology, Vol. 1, John Wiley & Sons, Inc., New York, which is incorporated by reference herein in its entirety). Exemplary immunoassays are described briefly below (but are not intended by way of limitation).

[0453] Immunoprecipitation protocols generally comprise lysing a population of cells in a lysis buffer such as RIPA buffer (1% NP-40 or Triton X-100, 1% sodium deoxycholate, 0.1% SDS, 0.15 M NaCl, 0.01 M sodium phosphate at pH 7.2, 1% Trasylol) supplemented with protein phosphatase and/or protease inhibitors (e.g., EDTA, PMSF, aprotinin, sodium vanadate), adding the antibody of interest to the cell lysate, incubating for a period of time (e.g., 1-4 hours) at 4° C., adding protein A and/or protein G sepharose beads to the cell lysate, incubating for about an hour or more at 4° C., washing the beads in lysis buffer and resuspending the beads in SDS/sample buffer. The ability of the antibody of interest to immunoprecipitate a particular antigen can be assessed by, e.g., western blot analysis. One of skill in the art would be knowledgeable as to the parameters that can be modified to increase the binding of the antibody to an antigen and decrease the background (e.g., pre-clearing the cell lysate with sepharose beads). For further discussion regarding immunoprecipitation protocols see, e.g., Ausubel et al, eds, 1994, Current Protocols in Molecular Biology, Vol. 1, John Wiley & Sons, Inc., New York at 10.16.1.

[0454] Western blot analysis generally comprises preparing protein samples, electrophoresis of the protein samples in a polyacrylamide gel (e.g., 8%-20% SDS-PAGE depending on the molecular weight of the antigen), transferring the protein sample from the polyacrylamide gel to a membrane such as nitrocellulose, PVDF or nylon, blocking the membrane in blocking solution (e.g., PBS with 3% BSA or non-fat milk), washing the membrane in washing buffer (e.g., PBS-Tween 20), blocking the membrane with primary antibody (the antibody of interest) diluted in blocking buffer, washing the membrane in washing buffer, blocking the membrane with a secondary antibody (which recognizes the primary antibody, e.g., an anti-human antibody) conjugated to an enzymatic substrate (e.g., horseradish peroxidase or alkaline phosphatase) or radioactive molecule (e.g., 32P or 125I) diluted in blocking buffer, washing the membrane in wash buffer, and detecting the presence of the antigen. One of skill in the art would be knowledgeable as to the parameters that can be modified to increase the signal detected and to reduce the background noise. For further discussion regarding western blot protocols see, e.g., Ausubel et al, eds, 1994, Current Protocols in Molecular Biology, Vol. 1, John Wiley & Sons, Inc., New York at 10.8.1.

[0455] ELISAs comprise preparing antigen, coating the well of a 96 well microtiter plate with the antigen, adding the antibody of interest conjugated to a detectable compound such as an enzymatic substrate (e.g., horseradish peroxidase or alkaline phosphatase) to the well and incubating for a period of time, and detecting the presence of the antigen. In ELISAs the antibody of interest does not have to be conjugated to a detectable compound; instead, a second antibody (which recognizes the antibody of interest) conjugated to a detectable compound may be added to the well. Further, instead of coating the well with the antigen, the antibody may be coated to the well. In this case, a second antibody conjugated to a detectable compound may be added following the addition of the antigen of interest to the coated well. One of skill in the art would be knowledgeable as to the parameters that can be modified to increase the signal detected as well as other variations of ELISAs known in the art. For further discussion regarding ELISAs see, e.g., Ausubel et al, eds, 1994, Current Protocols in Molecular Biology, Vol. 1, John Wiley & Sons, Inc., New York at 11.2.1.

[0456] The binding affinity of an antibody to an antigen and the off-rate of an antibody-antigen interaction can be determined by competitive binding assays. One example of a competitive binding assay is a radioimmunoassay comprising the incubation of labeled antigen (e.g., 3H or 125I) with the antibody of interest in the presence of increasing amounts of unlabeled antigen, and the detection of the antibody bound to the labeled antigen. The affinity of the antibody of interest for a particular antigen and the binding off-rates can be determined from the data by scatchard plot analysis. Competition with a second antibody can also be determined using radioimmunoassays. In this case, the antigen is incubated with antibody of interest conjugated to a labeled compound (e.g., 3H or 125I) in the presence of increasing amounts of an unlabeled second antibody.

### Therapeutic Uses of Antibodies

[0457] The present invention is further directed to antibody-based therapies which involve administering antibodies of the invention to an animal, preferably a mammal, and most preferably a human, patient for treating one or more of the disclosed diseases, disorders, or conditions. Therapeutic compounds of the invention include, but are not limited to, antibodies of the invention (including fragments, analogs and derivatives thereof as described herein) and nucleic acids encoding antibodies of the invention (including fragments, analogs and derivatives thereof and anti-idiotypic antibodies as described herein). The antibodies of the invention can be used to treat, inhibit or prevent diseases, disorders or conditions associated with aberrant expression and/or activity of a polypeptide of the invention, including, but not limited to, any one or more of the diseases, disorders, or conditions described herein. The treatment and/or prevention of diseases, disorders, or conditions associated with aberrant expression and/or activity of a polypeptide of the invention includes, but is not limited to, alleviating symptoms associated with those diseases, disorders or conditions. Antibodies of the invention may be provided in pharmaceutically acceptable compositions as known in the art or as described herein.

[0458] A summary of the ways in which the antibodies of the present invention may be used therapeutically includes binding polynucleotides or polypeptides of the present invention locally or systemically in the body or by direct cytotoxicity of the antibody, e.g. as mediated by complement (CDC) or by effector cells (ADCC). Some of these approaches are described in more detail below. Armed with the teachings provided herein, one of ordinary skill in the art will know how to use the antibodies of the present invention for diagnostic, monitoring or therapeutic purposes without undue experimentation.

[0459] The antibodies of this invention may be advantageously utilized in combination with other monoclonal or chimeric antibodies, or with lymphokines or hematopoietic growth factors (such as, e.g., IL-2, IL-3 and IL-7), for example, which serve to increase the number or activity of effector cells which interact with the antibodies.

[0460] The antibodies of the invention may be administered alone or in combination with other types of treatments (e.g., radiation therapy, chemotherapy, hormonal therapy, immunotherapy and anti-tumor agents). Generally, administration of products of a species origin or species reactivity (in the case of antibodies) that is the same species as that of the patient is preferred. Thus, in a preferred embodiment, human antibodies, fragments derivatives, analogs, or nucleic acids, are administered to a human patient for therapy or prophylaxis.

[0461] It is preferred to use high affinity and/or potent in vivo inhibiting and/or neutralizing antibodies against polypeptides or polynucleotides of the present invention, fragments or regions thereof, for both immunoassays directed to and therapy of disorders related to polynucleotides or polypeptides, including fragments thereof, of the present invention. Such antibodies, fragments, or regions, will preferably have an affinity for polynucleotides or polypeptides of the invention, including fragments thereof. Preferred binding affinities include those with a dissociation constant or Kd less than 5×10-2 M, 10-2 M, 5×10-3 M, 10-3 M, 5×10-4 M, 10-4 M, 5×10-5 M, 10-5 M, 5×10-6 M, 10-6 M, 5×10-7 M, 10-7 M, 5×10-8 M, 10-8 M, 5×10-9 M, 10-9 M, 5×10-10 M, 10-10 M, 5×10-11 M, 10-11 M, 5×10-12 M, 10-12 M, 5×10-13 M, 10-13 M, 5×10-14 M, 10-14 M, 5×10-15 M, and 10-15 M.

[0462] Antibodies directed against polypeptides of the present invention are useful for inhibiting allergic reactions in animals. For example, by administering a therapeutically acceptable dose of an antibody, or antibodies, of the present invention, or a cocktail of the present antibodies, or in combination with other antibodies of varying sources, the animal may not elicit an allergic response to antigens.

[0463] Likewise, one could envision cloning the gene encoding an antibody directed against a polypeptide of the present invention, said polypeptide having the potential to elicit an allergic and/or immune response in an organism, and transforming the organism with said antibody gene such that it is expressed (e.g., constitutively, inducibly, etc.) in the organism. Thus, the organism would effectively become resistant to an allergic response resulting from the ingestion or presence of such an immune/allergic reactive polypeptide. Moreover, such a use of the antibodies of the present invention may have particular utility in preventing and/or ameliorating autoimmune diseases and/or disorders, as such conditions are typically a result of antibodies being directed against endogenous proteins. For example, in the instance where the polypeptide of the present invention is responsible for modulating the immune response to auto-antigens, transforming the organism and/or individual with a construct comprising any of the promoters disclosed herein or otherwise known in the art, in addition, to a polynucleotide encoding the antibody directed against the polypeptide of the present invention could effective inhibit the organisms immune system from eliciting an immune response to the auto-antigen(s). Detailed descriptions of therapeutic and/or gene therapy applications of the present invention are provided elsewhere herein.

[0464] Alternatively, antibodies of the present invention could be produced in a plant (e.g., cloning the gene of the antibody directed against a polypeptide of the present invention, and transforming a plant with a suitable vector comprising said gene for constitutive expression of the antibody within the plant), and the plant subsequently ingested by an animal, thereby conferring temporary immunity to the animal for the specific antigen the antibody is directed towards (See, for example, U.S. Pat. Nos. 5,914,123 and 6,034,298).

[0465] In another embodiment, antibodies of the present invention, preferably polyclonal antibodies, more preferably monoclonal antibodies, and most preferably single-chain antibodies, can be used as a means of inhibiting gene expression of a particular gene, or genes, in a human, mammal, and/or other organism. See, for example, International Publication Number WO 00/05391, published Feb. 2, 2000 to Dow Agrosciences LLC. The application of such methods for the antibodies of the present invention are known in the art, and are more particularly described elsewhere herein.

[0466] In yet another embodiment, antibodies of the present invention may be useful for multimerizing the polypeptides of the present invention. For example, certain proteins may confer enhanced biological activity when present in a multimeric state (i.e., such enhanced activity may be due to the increased effective concentration of such proteins whereby more protein is available in a localized location).

### Antibody-Based Gene Therapy

[0467] In a specific embodiment, nucleic acids comprising sequences encoding antibodies or functional derivatives thereof, are administered to treat, inhibit or prevent a disease or disorder associated with aberrant expression and/or activity of a polypeptide of the invention, by way of gene therapy. Gene therapy refers to therapy performed by the administration to a subject of an expressed or expressible nucleic acid. In this embodiment of the invention, the nucleic acids produce their encoded protein that mediates a therapeutic effect.

[0468] Any of the methods for gene therapy available in the art can be used according to the present invention. Exemplary methods are described below.

[0469] For general reviews of the methods of gene therapy, see Goldspiel et al., Clinical Pharmacy 12:488-505 (1993); Wu and Wu, Biotherapy 3:87-95 (1991); Tolstoshev, Ann. Rev. Pharmacol. Toxicol. 32:573-596 (1993); Mulligan, Science 260:926-932 (1993); and Morgan and Anderson, Ann. Rev. Biochem. 62:191-217 May, 1993; TIBTECH 11(5):155-215 (1993). Methods commonly known in the art of recombinant DNA technology which can be used are described in Ausubel et al. (eds.), Current Protocols in Molecular Biology, John Wiley & Sons, NY (1993); and Kriegler, Gene Transfer and Expression, A Laboratory Manual, Stockton Press, NY (1990).

[0470] In a preferred aspect, the compound comprises nucleic acid sequences encoding an antibody, said nucleic acid sequences being part of expression vectors that express the antibody or fragments or chimeric proteins or heavy or light chains thereof in a suitable host. In particular, such nucleic acid sequences have promoters operably linked to the antibody coding region, said promoter being inducible or constitutive, and, optionally, tissue-specific. In another particular embodiment, nucleic acid molecules are used in which the antibody coding sequences and any other desired sequences are flanked by regions that promote homologous recombination at a desired site in the genome, thus providing for intrachromosomal expression of the antibody encoding nucleic acids (Koller and Smithies, Proc. Natl. Acad. Sci. USA 86:8932-8935 (1989); Zijlstra et al., Nature 342:435-438 (1989). In specific embodiments, the expressed antibody molecule is a single chain antibody; alternatively, the nucleic acid sequences include sequences encoding both the heavy and light chains, or fragments thereof, of the antibody.

[0471] Delivery of the nucleic acids into a patient may be either direct, in which case the patient is directly exposed to the nucleic acid or nucleic acid-carrying vectors, or indirect, in which case, cells are first transformed with the nucleic acids in vitro, then transplanted into the patient. These two approaches are known, respectively, as in vivo or ex vivo gene therapy.

[0472] In a specific embodiment, the nucleic acid sequences are directly administered in vivo, where it is expressed to produce the encoded product. This can be accomplished by any of numerous methods known in the art, e.g., by constructing them as part of an appropriate nucleic acid expression vector and administering it so that they become intracellular, e.g., by infection using defective or attenuated retrovirals or other viral vectors (see U.S. Pat. No. 4,980,286), or by direct injection of naked DNA, or by use of microparticle bombardment (e.g., a gene gun; Biolistic, Dupont), or coating with lipids or cell-surface receptors or transfecting agents, encapsulation in liposomes, microparticles, or microcapsules, or by administering them in linkage to a peptide which is known to enter the nucleus, by administering it in linkage to a ligand subject to receptor-mediated endocytosis (see, e.g., Wu and Wu, J. Biol. Chem. 262:4429-4432 (1987)) (which can be used to target cell types specifically expressing the receptors), etc. In another embodiment, nucleic acid-ligand complexes can be formed in which the ligand comprises a fusogenic viral peptide to disrupt endosomes, allowing the nucleic acid to avoid lysosomal degradation. In yet another embodiment, the nucleic acid can be targeted in vivo for cell specific uptake and expression, by targeting a specific receptor (see, e.g., PCT Publications WO 92/06180; WO 92/22635; WO92/20316; WO93/14188, WO 93/20221). Alternatively, the nucleic acid can be introduced intracellularly and incorporated within host cell DNA for expression, by homologous recombination (Koller and Smithies, Proc. Natl. Acad. Sci. USA 86:8932-8935 (1989); Zijlstra et al., Nature 342:435-438 (1989)).

[0473] In a specific embodiment, viral vectors that contains nucleic acid sequences encoding an antibody of the invention are used. For example, a retroviral vector can be used (see Miller et al., Meth. Enzymol. 217:581-599 (1993)). These retroviral vectors contain the components necessary for the correct packaging of the viral genome and integration into the host cell DNA. The nucleic acid sequences encoding the antibody to be used in gene therapy are cloned into one or more vectors, which facilitates delivery of the gene into a patient. More detail about retroviral vectors can be found in Boesen et al., Biotherapy 6:291-302 (J994), which describes the use of a retroviral vector to deliver the mdr1 gene to hematopoietic stem cells in order to make the stem cells more resistant to chemotherapy. Other references illustrating the use of retroviral vectors in gene therapy are: Clowes et al., J. Clin. Invest. 93:644-651 (1994); Kiem et al., Blood 83:1467-1473 (1994); Salmons and Gunzberg, Human Gene Therapy 4:129-141 (1993); and Grossman and Wilson, Curr. Opin. in Genetics and Devel. 3:110-114 (1993).

[0474] Adenoviruses are other viral vectors that can be used in gene therapy. Adenoviruses are especially attractive vehicles for delivering genes to respiratory epithelia. Adenoviruses naturally infect respiratory epithelia where they cause a mild disease. Other targets for adenovirus-based delivery systems are liver, the central nervous system, endothelial cells, and muscle. Adenoviruses have the advantage of being capable of infecting non-dividing cells. Kozarsky and Wilson, Current Opinion in Genetics and Development 3:499-503 (1993) present a review of adenovirus-based gene therapy. Bout et al., Human Gene Therapy 5:3-10 (1994) demonstrated the use of adenovirus vectors to transfer genes to the respiratory epithelia of rhesus monkeys. Other instances of the use of adenoviruses in gene therapy can be found in Rosenfeld et al., Science 252:431-434 (1991); Rosenfeld et al., Cell 68:143-155 (1992); Mastrangeli et al., J. Clin. Invest. 91:225-234 (1993); PCT Publication WO94/12649; and Wang, et al., Gene Therapy 2:775-783 (1995). In a preferred embodiment, adenovirus vectors are used.

[0475] Adeno-associated virus (AAV) has also been proposed for use in gene therapy (Walsh et al., Proc. Soc. Exp. Biol. Med. 204:289-300 (1993); U.S. Pat. No. 5,436,146).

[0476] Another approach to gene therapy involves transferring a gene to cells in tissue culture by such methods as electroporation, lipofection, calcium phosphate mediated transfection, or viral infection. Usually, the method of transfer includes the transfer of a selectable marker to the cells. The cells are then placed under selection to isolate those cells that have taken up and are expressing the transferred gene. Those cells are then delivered to a patient.

[0477] In this embodiment, the nucleic acid is introduced into a cell prior to administration in vivo of the resulting recombinant cell. Such introduction can be carried out by any method known in the art, including but not limited to transfection, electroporation, microinjection, infection with a viral or bacteriophage vector containing the nucleic acid sequences, cell fusion, chromosome-mediated gene transfer, microcell-mediated gene transfer, spheroplast fusion, etc. Numerous techniques are known in the art for the introduction of foreign genes into cells (see, e.g., Loeffler and Behr, Meth. Enzymol. 217:599-618 (1993); Cohen et al., Meth. Enzymol. 217:618-644 (1993); Cline, Pharmac. Ther. 29:69-92m (1985) and may be used in accordance with the present invention, provided that the necessary developmental and physiological functions of the recipient cells are not disrupted. The technique should provide for the stable transfer of the nucleic acid to the cell, so that the nucleic acid is expressible by the cell and preferably heritable and expressible by its cell progeny.

[0478] The resulting recombinant cells can be delivered to a patient by various methods known in the art. Recombinant blood cells (e.g., hematopoietic stem or progenitor cells) are preferably administered intravenously. The amount of cells envisioned for use depends on the desired effect, patient state, etc., and can be determined by one skilled in the art.

[0479] Cells into which a nucleic acid can be introduced for purposes of gene therapy encompass any desired, available cell type, and include but are not limited to epithelial cells, endothelial cells, keratinocytes, fibroblasts, muscle cells, hepatocytes; blood cells such as Tlymphocytes, Blymphocytes, monocytes, macrophages, neutrophils, cosinophils, megakaryocytes, granulocytes; various stem or progenitor cells, in particular hematopoietic stem or progenitor cells, e.g., as obtained from bone marrow, umbilical cord blood, peripheral blood, fetal liver, etc.

[0480] In a preferred embodiment, the cell used for gene therapy is autologous to the patient.

[0481] In an embodiment in which recombinant cells are used in gene therapy, nucleic acid sequences encoding an antibody are introduced into the cells such that they are expressible by the cells or their progeny, and the recombinant cells are then administered in vivo for therapeutic effect. In a specific embodiment, stem or progenitor cells are used. Any stem and/or progenitor cells which can be isolated and maintained in vitro can potentially be used in accordance with this embodiment of the present invention (see e.g. PCT Publication WO 94/08598; Stemple and Anderson, Cell 71:973-985 (1992); Rheinwald, Meth. Cell Bio. 21A:229 (1980); and Pittelkow and Scott, Mayo Clinic Proc. 61:771 (1986)).

[0482] In a specific embodiment, the nucleic acid to be introduced for purposes of gene therapy comprises an inducible promoter operably linked to the coding region, such that expression of the nucleic acid is controllable by controlling the presence or absence of the appropriate inducer of transcription. Demonstration of Therapeutic or Prophylactic Activity The compounds or pharmaceutical compositions of the invention are preferably tested in vitro, and then in vivo for the desired therapeutic or prophylactic activity, prior to use in humans. For example, in vitro assays to demonstrate the therapeutic or prophylactic utility of a compound or pharmaceutical composition include, the effect of a compound on a cell line or a patient tissue sample. The effect of the compound or composition on the cell line and/or tissue sample can be determined utilizing techniques known to those of skill in the art including, but not limited to, rosette formation assays and cell lysis assays. In accordance with the invention, in vitro assays which can be used to determine whether administration of a specific compound is indicated, include in vitro cell culture assays in which a patient tissue sample is grown in culture, and exposed to or otherwise administered a compound, and the effect of such compound upon the tissue sample is observed.

### Therapeutic/Prophylactic Administration and Compositions

[0483] The invention provides methods of treatment, inhibition and prophylaxis by administration to a subject of an effective amount of a compound or pharmaceutical composition of the invention, preferably an antibody of the invention. In a preferred aspect, the compound is substantially purified (e.g., substantially free from substances that limit its effect or produce undesired side-effects). The subject is preferably an animal, including but not limited to animals such as cows, pigs, horses, chickens, cats, dogs, etc., and is preferably a mammal, and most preferably human.

[0484] Formulations and methods of administration that can be employed when the compound comprises a nucleic acid or an immunoglobulin are described above; additional appropriate formulations and routes of administration can be selected from among those described herein below.

[0485] Various delivery systems are known and can be used to administer a compound of the invention, e.g., encapsulation in liposomes, microparticles, microcapsules, recombinant cells capable of expressing the compound, receptor-mediated endocytosis (see, e.g., Wu and Wu, J. Biol. Chem. 262:4429-4432 (1987)), construction of a nucleic acid as part of a retroviral or other vector, etc. Methods of introduction include but are not limited to intradermal, intramuscular, intraperitoneal, intravenous, subcutaneous, intranasal, epidural, and oral routes. The compounds or compositions may be administered by any convenient route, for example by infusion or bolus injection, by absorption through epithelial or mucocutaneous linings (e.g., oral mucosa, rectal and intestinal mucosa, etc.) and may be administered together with other biologically active agents. Administration can be systemic or local. In addition, it may be desirable to introduce the pharmaceutical compounds or compositions of the invention into the central nervous system by any suitable route, including intraventricular and intrathecal injection; intraventricular injection may be facilitated by an intraventricular catheter, for example, attached to a reservoir, such as an Ommaya reservoir. Pulmonary administration can also be employed, e.g., by use of an inhaler or nebulizer, and formulation with an aerosolizing agent.

[0486] In a specific embodiment, it may be desirable to administer the pharmaceutical compounds or compositions of the invention locally to the area in need of treatment; this may be achieved by, for example, and not by way of limitation, local infusion during surgery, topical application, e.g., in conjunction with a wound dressing after surgery, by injection, by means of a catheter, by means of a suppository, or by means of an implant, said implant being of a porous, non-porous, or gelatinous material, including membranes, such as sialastic membranes, or fibers. Preferably, when administering a protein, including an antibody, of the invention, care must be taken to use materials to which the protein does not absorb.

[0487] In another embodiment, the compound or composition can be delivered in a vesicle, in particular a liposome (see Langer, Science 249:1527-1533 (1990); Treat et al., in Liposomes in the Therapy of Infectious Disease and Cancer, Lopez-Berestein and Fidler (eds.), Liss, New York, pp. 353-365 (1989); Lopez-Berestein, ibid., pp. 317-327; see generally ibid.) In yet another embodiment, the compound or composition can be delivered in a controlled release system. In one embodiment, a pump may be used (see Langer, supra; Sefton, CRC Crit. Ref. Biomed. Eng. 14:201 (1987); Buchwald et al., Surgery 88:507 (1980); Saudek et al., N. Engl. J. Med. 321:574 (1989)). In another embodiment, polymeric materials can be used (see Medical Applications of Controlled Release, Langer and Wise (eds.), CRC Pres., Boca Raton, Fla. (1974); Controlled Drug Bioavailability, Drug Product Design and Performance, Smolen and Ball (eds.), Wiley, New York (1984); Ranger and Peppas, J., Macromol. Sci. Rev. Macromol. Chem. 23:61 (1983); see also Levy et al., Science 228:190 (1985); During et al., Ann. Neurol. 25:351 (1989); Howard et al., J. Neurosurg. 71:105 (1989)). In yet another embodiment, a controlled release system can be placed in proximity of the therapeutic target, i.e., the brain, thus requiring only a fraction of the systemic dose (see, e.g., Goodson, in Medical Applications of Controlled Release, supra, vol. 2, pp. 115-138 (1984)).

[0488] Other controlled release systems are discussed in the review by Langer (Science 249:1527-1533 (1990)).

[0489] In a specific embodiment where the compound of the invention is a nucleic acid encoding a protein, the nucleic acid can be administered in vivo to promote expression of its encoded protein, by constructing it as part of an appropriate nucleic acid expression vector and administering it so that it becomes intracellular, e.g., by use of a retroviral vector (see U.S. Pat. No. 4,980,286), or by direct injection, or by use of microparticle bombardment (e.g., a gene gun; Biolistic, Dupont), or coating with lipids or cell-surface receptors or transfecting agents, or by administering it in linkage to a homeobox-like peptide which is known to enter the nucleus (see e.g., Joliot et al., Proc. Natl. Acad. Sci. USA 88:1864-1868 (1991)), etc. Alternatively, a nucleic acid can be introduced intracellularly and incorporated within host cell DNA for expression, by homologous recombination.

[0490] The present invention also provides pharmaceutical compositions. Such compositions comprise a therapeutically effective amount of a compound, and a pharmaceutically acceptable carrier. In a specific embodiment, the term “pharmaceutically acceptable” means approved by a regulatory agency of the Federal or a state government or listed in the U.S. Pharmacopeia or other generally recognized pharmacopeia for use in animals, and more particularly in humans. The term “carrier” refers to a diluent, adjuvant, excipient, or vehicle with which the therapeutic is administered. Such pharmaceutical carriers can be sterile liquids, such as water and oils, including those of petroleum, animal, vegetable or synthetic origin, such as peanut oil, soybean oil, mineral oil, sesame oil and the like. Water is a preferred carrier when the pharmaceutical composition is administered intravenously. Saline solutions and aqueous dextrose and glycerol solutions can also be employed as liquid carriers, particularly for injectable solutions. Suitable pharmaceutical excipients include starch, glucose, lactose, sucrose, gelatin, malt, rice, flour, chalk, silica gel, sodium stearate, glycerol monostearate, talc, sodium chloride, dried skim milk, glycerol, propylene, glycol, water, ethanol and the like. The composition, if desired, can also contain minor amounts of wetting or emulsifying agents, or pH buffering agents. These compositions can take the form of solutions, suspensions, emulsion, tablets, pills, capsules, powders, sustained-release formulations and the like. The composition can be formulated as a suppository, with traditional binders and carriers such as triglycerides. Oral formulation can include standard carriers such as pharmaceutical grades of mannitol, lactose, starch, magnesium stearate, sodium saccharine, cellulose, magnesium carbonate, etc. Examples of suitable pharmaceutical carriers are described in “Remington's Pharmaceutical Sciences” by E. W. Martin. Such compositions will contain a therapeutically effective amount of the compound, preferably in purified form, together with a suitable amount of carrier so as to provide the form for proper administration to the patient. The formulation should suit the mode of administration.

[0491] In a preferred embodiment, the composition is formulated in accordance with routine procedures as a pharmaceutical composition adapted for intravenous administration to human beings. Typically, compositions for intravenous administration are solutions in sterile isotonic aqueous buffer. Where necessary, the composition may also include a solubilizing agent and a local anesthetic such as lignocaine to ease pain at the site of the injection. Generally, the ingredients are supplied either separately or mixed together in unit dosage form, for example, as a dry lyophilized powder or water free concentrate in a hermetically sealed container such as an ampoule or sachette indicating the quantity of active agent. Where the composition is to be administered by infusion, it can be dispensed with an infusion bottle containing sterile pharmaceutical grade water or saline. Where the composition is administered by injection, an ampoule of sterile water for injection or saline can be provided so that the ingredients may be mixed prior to administration.

[0492] The compounds of the invention can be formulated as neutral or salt forms. Pharmaceutically acceptable salts include those formed with anions such as those derived from hydrochloric, phosphoric, acetic, oxalic, tartaric acids, etc., and those formed with cations such as those derived from sodium, potassium, ammonium, calcium, ferric hydroxides, isopropylamine, triethylamine, 2-ethylamino ethanol, histidine, procaine, etc.

[0493] The amount of the compound of the invention which will be effective in the treatment, inhibition and prevention of a disease or disorder associated with aberrant expression and/or activity of a polypeptide of the invention can be determined by standard clinical techniques. In addition, in vitro assays may optionally be employed to help identify optimal dosage ranges. The precise dose to be employed in the formulation will also depend on the route of administration, and the seriousness of the disease or disorder, and should be decided according to the judgment of the practitioner and each patient's circumstances. Effective doses may be extrapolated from dose-response curves derived from in vitro or animal model test systems.

[0494] For antibodies, the dosage administered to a patient is typically 0.1 mg/kg to 100 mg/kg of the patient's body weight. Preferably, the dosage administered to a patient is between 0.1 mg/kg and 20 mg/kg of the patient's body weight, more preferably 1 mg/kg to 10 mg/kg of the patient's body weight. Generally, human antibodies have a longer half-life within the human body than antibodies from other species due to the immune response to the foreign polypeptides. Thus, lower dosages of human antibodies and less frequent administration is often possible. Further, the dosage and frequency of administration of antibodies of the invention may be reduced by enhancing uptake and tissue penetration (e.g., into the brain) of the antibodies by modifications such as, for example, lipidation.

[0495] The invention also provides a pharmaceutical pack or kit comprising one or more containers filled with one or more of the ingredients of the pharmaceutical compositions of the invention. Optionally associated with such container(s) can be a notice in the form prescribed by a governmental agency regulating the manufacture, use or sale of pharmaceuticals or biological products, which notice reflects approval by the agency of manufacture, use or sale for human administration.

### Diagnosis and Imaging with Antibodies

[0496] Labeled antibodies, and derivatives and analogs thereof, which specifically bind to a polypeptide of interest can be used for diagnostic purposes to detect, diagnose, or monitor diseases, disorders, and/or conditions associated with the aberrant expression and/or activity of a polypeptide of the invention. The invention provides for the detection of aberrant expression of a polypeptide of interest, comprising (a) assaying the expression of the polypeptide of interest in cells or body fluid of an individual using one or more antibodies specific to the polypeptide interest and (b) comparing the level of gene expression with a standard gene expression level, whereby an increase or decrease in the assayed polypeptide gene expression level compared to the standard expression level is indicative of aberrant expression.

[0497] The invention provides a diagnostic assay for diagnosing a disorder, comprising (a) assaying the expression of the polypeptide of interest in cells or body fluid of an individual using one or more antibodies specific to the polypeptide interest and (b) comparing the level of gene expression with a standard gene expression level, whereby an increase or decrease in the assayed polypeptide gene expression level compared to the standard expression level is indicative of a particular disorder. With respect to cancer, the presence of a relatively high amount of transcript in biopsied tissue from an individual may indicate a predisposition for the development of the disease, or may provide a means for detecting the disease prior to the appearance of actual clinical symptoms. A more definitive diagnosis of this type may allow health professionals to employ preventative measures or aggressive treatment earlier thereby preventing the development or further progression of the cancer.

[0498] Antibodies of the invention can be used to assay protein levels in a biological sample using classical immunohistological methods known to those of skill in the art (e.g., see Jalkanen, et al., J. Cell. Biol. 101:976-985 (1985); Jalkanen, et al., J. Cell. Biol. 105:3087-3096 (1987)). Other antibody-based methods useful for detecting protein gene expression include immunoassays, such as the enzyme linked immunosorbent assay (ELISA) and the radioimmunoassay (RIA). Suitable antibody assay labels are known in the art and include enzyme labels, such as, glucose oxidase; radioisotopes, such as iodine (125I, 121I), carbon (14C), sulfur (35S), tritium (3H), indium (112In), and technetium (99Tc); luminescent labels, such as luminol; and fluorescent labels, such as fluorescein and rhodamine, and biotin.

[0499] One aspect of the invention is the detection and diagnosis of a disease or disorder associated with aberrant expression of a polypeptide of interest in an animal, preferably a mammal and most preferably a human. In one embodiment, diagnosis comprises: a) administering (for example, parenterally, subcutaneously, or intraperitoneally) to a subject an effective amount of a labeled molecule which specifically binds to the polypeptide of interest; b) waiting for a time interval following the administering for permitting the labeled molecule to preferentially concentrate at sites in the subject where the polypeptide is expressed (and for unbound labeled molecule to be cleared to background level); c) determining background level; and d) detecting the labeled molecule in the subject, such that detection of labeled molecule above the background level indicates that the subject has a particular disease or disorder associated with aberrant expression of the polypeptide of interest. Background level can be determined by various methods including, comparing the amount of labeled molecule detected to a standard value previously determined for a particular system.

[0500] It will be understood in the art that the size of the subject and the imaging system used will determine the quantity of imaging moiety needed to produce diagnostic images. In the case of a radioisotope moiety, for a human subject, the quantity of radioactivity injected will normally range from about 5 to 20 millicuries of 99mTc. The labeled antibody or antibody fragment will then preferentially accumulate at the location of cells which contain the specific protein. In vivo tumor imaging is described in S. W. Burchiel et al., “Immunopharmacokinetics of Radiolabeled Antibodies and Their Fragments.” (Chapter 13 in Tumor Imaging: The Radiochemical Detection of Cancer, S. W. Burchiel and B. A. Rhodes, eds., Masson Publishing Inc. (1982).

[0501] Depending on several variables, including the type of label used and the mode of administration, the time interval following the administration for permitting the labeled molecule to preferentially concentrate at sites in the subject and for unbound labeled molecule to be cleared to background level is 6 to 48 hours or 6 to 24 hours or 6 to 12 hours. In another embodiment the time interval following administration is 5 to 20 days or 5 to 10 days.

[0502] In an embodiment, monitoring of the disease or disorder is carried out by repeating the method for diagnosing the disease or disease, for example, one month after initial diagnosis, six months after initial diagnosis, one year after initial diagnosis, etc.

[0503] Presence of the labeled molecule can be detected in the patient using methods known in the art for in vivo scanning. These methods depend upon the type of label used. Skilled artisans will be able to determine the appropriate method for detecting a particular label. Methods and devices that may be used in the diagnostic methods of the invention include, but are not limited to, computed tomography (CT), whole body scan such as position emission tomography (PET), magnetic resonance imaging (MRI), and sonography.

[0504] In a specific embodiment, the molecule is labeled with a radioisotope and is detected in the patient using a radiation responsive surgical instrument (Thurston et al., U.S. Pat. No. 5,441,050). In another embodiment, the molecule is labeled with a fluorescent compound and is detected in the patient using a fluorescence responsive scanning instrument. In another embodiment, the molecule is labeled with a positron emitting metal and is detected in the patent using positron emission-tomography. In yet another embodiment, the molecule is labeled with a paramagnetic label and is detected in a patient using magnetic resonance imaging (MRI).

### Kits

[0505] The present invention provides kits that can be used in the above methods. In one embodiment, a kit comprises an antibody of the invention, preferably a purified antibody, in one or more containers. In a specific embodiment, the kits of the present invention contain a substantially isolated polypeptide comprising an epitope which is specifically immunoreactive with an antibody included in the kit. Preferably, the kits of the present invention further comprise a control antibody which does not react with the polypeptide of interest. In another specific embodiment, the kits of the present invention contain a means for detecting the binding of an antibody to a polypeptide of interest (e.g., the antibody may be conjugated to a detectable substrate such as a fluorescent compound, an enzymatic substrate, a radioactive compound or a luminescent compound, or a second antibody which recognizes the first antibody may be conjugated to a detectable substrate).

[0506] In another specific embodiment of the present invention, the kit is a diagnostic kit for use in screening serum containing antibodies specific against proliferative and/or cancerous polynucleotides and polypeptides. Such a kit may include a control antibody that does not react with the polypeptide of interest. Such a kit may include a substantially isolated polypeptide antigen comprising an epitope which is specifically immunoreactive with at least one anti-polypeptide antigen antibody. Further, such a kit includes means for detecting the binding of said antibody to the antigen (e.g., the antibody may be conjugated to a fluorescent compound such as fluorescein or rhodamine which can be detected by flow cytometry). In specific embodiments, the kit may include a recombinantly produced or chemically synthesized polypeptide antigen. The polypeptide antigen of the kit may also be attached to a solid support.

[0507] In a more specific embodiment the detecting means of the above-described kit includes a solid support to which said polypeptide antigen is attached. Such a kit may also include a non-attached reporter-labeled anti-human antibody. In this embodiment, binding of the antibody to the polypeptide antigen can be detected by binding of the said reporter-labeled antibody.

[0508] In an additional embodiment, the invention includes a diagnostic kit for use in screening serum containing antigens of the polypeptide of the invention. The diagnostic kit includes a substantially isolated antibody specifically immunoreactive with polypeptide or polynucleotide antigens, and means for detecting the binding of the polynucleotide or polypeptide antigen to the antibody. In one embodiment, the antibody is attached to a solid support. In a specific embodiment, the antibody may be a monoclonal antibody. The detecting means of the kit may include a second, labeled monoclonal antibody. Alternatively, or in addition, the detecting means may include a labeled, competing antigen.

[0509] In one diagnostic configuration, test serum is reacted with a solid phase reagent having a surface-bound antigen obtained by the methods of the present invention. After binding with specific antigen antibody to the reagent and removing unbound serum components by washing, the reagent is reacted with reporter-labeled anti-human antibody to bind reporter to the reagent in proportion to the amount of bound anti-antigen antibody on the solid support. The reagent is again washed to remove unbound labeled antibody, and the amount of reporter associated with the reagent is determined. Typically, the reporter is an enzyme which is detected by incubating the solid phase in the presence of a suitable fluorometric, luminescent or calorimetric substrate (Sigma, St. Louis, Mo.).

[0510] The solid surface reagent in the above assay is prepared by known techniques for attaching protein material to solid support material, such as polymeric beads, dip sticks, 96-well plate or filter material. These attachment methods generally include non-specific adsorption of the protein to the support or covalent attachment of the protein, typically through a free amine group, to a chemically reactive group on the solid support, such as an activated carboxyl, hydroxyl, or aldehyde group. Alternatively, streptavidin coated plates can be used in conjunction with biotinylated antigen(s).

[0511] Thus, the invention provides an assay system or kit for carrying out this diagnostic method. The kit generally includes a support with surface-bound recombinant antigens, and a reporter-labeled anti-human antibody for detecting surface-bound anti-antigen antibody.

### Fusion Proteins

[0512] Any polypeptide of the present invention can be used to generate fusion proteins. For example, the polypeptide of the present invention, when fused to a second protein, can be used as an antigenic tag. Antibodies raised against the polypeptide of the present invention can be used to indirectly detect the second protein by binding to the polypeptide. Moreover, because certain proteins target cellular locations based on trafficking signals, the polypeptides of the present invention can be used as targeting molecules once fused to other proteins.

[0513] Examples of domains that can be fused to polypeptides of the present invention include not only heterologous signal sequences, but also other heterologous functional regions. The fusion does not necessarily need to be direct, but may occur through linker sequences.

[0514] Moreover, fusion proteins may also be engineered to improve characteristics of the polypeptide of the present invention. For instance, a region of additional amino acids, particularly charged amino acids, may be added to the N-terminus of the polypeptide to improve stability and persistence during purification from the host cell or subsequent handling and storage. Peptide moieties may be added to the polypeptide to facilitate purification. Such regions may be removed prior to final preparation of the polypeptide. Similarly, peptide cleavage sites can be introduced in-between such peptide moieties, which could additionally be subjected to protease activity to remove said peptide(s) from the protein of the present invention. The addition of peptide moieties, including peptide cleavage sites, to facilitate handling of polypeptides are familiar and routine techniques in the art.

[0515] Moreover, polypeptides of the present invention, including fragments, and specifically epitopes, can be combined with parts of the constant domain of immunoglobulins (IgA, IgE, IgG, IgM) or portions thereof (CH1, CH2, CH3, and any combination thereof, including both entire domains and portions thereof), resulting in chimeric polypeptides. These fusion proteins facilitate purification and show an increased half-life in vivo. One reported example describes chimeric proteins consisting of the first two domains of the human CD4-polypeptide and various domains of the constant regions of the heavy or light chains of mammalian immunoglobulins. (EP A 394,827; Traunecker et al., Nature 331:84-86 (1988).) Fusion proteins having disulfide-linked dimeric structures (due to the IgG) can also be more efficient in binding and neutralizing other molecules, than the monomeric secreted protein or protein fragment alone. (Fountoulakis et al., J. Biochem. 270:3958-3964 (1995).)

[0516] Similarly, EP-A-O 464 533 (Canadian counterpart 2045869) discloses fusion proteins comprising various portions of the constant region of immunoglobulin molecules together with another human protein or part thereof. In many cases, the Fc part in a fusion protein is beneficial in therapy and diagnosis, and thus can result in, for example, improved pharmacokinetic properties. (EP-A 0232 262.) Alternatively, deleting the Fc part after the fusion protein has been expressed, detected, and purified, would be desired. For example, the Fc portion may hinder therapy and diagnosis if the fusion protein is used as an antigen for immunizations. In drug discovery, for example, human proteins, such as hIL-5, have been fused with Fc portions for the purpose of high-throughput screening assays to identify antagonists of hIL-5. (See, D. Bennett et al., J. Molecular Recognition 8:52-58 (1995); K. Johanson et al., J. Biol. Chem. 270:9459-9471 (1995).)

[0517] Moreover, the polypeptides of the present invention can be fused to marker sequences (also referred to as “tags”). Due to the availability of antibodies specific to such “tags”, purification of the fused polypeptide of the invention, and/or its identification is significantly facilitated since antibodies specific to the polypeptides of the invention are not required. Such purification may be in the form of an affinity purification whereby an anti-tag antibody or another type of affinity matrix (e.g., anti-tag antibody attached to the matrix of a flow-thru column) that binds to the epitope tag is present. In preferred embodiments, the marker amino acid sequence is a hexa-histidine peptide, such as the tag provided in a pQE vector (QIAGEN, Inc., 9259 Eton Avenue, Chatsworth, Calif., 91311), among others, many of which are commercially available. As described in Gentz et al., Proc. Natl. Acad. Sci. USA 86:821-824 (1989), for instance, hexa-histidine provides for convenient purification of the fusion protein. Another peptide tag useful for purification, the “HA” tag, corresponds to an epitope derived from the influenza hemagglutinin protein. (Wilson et al., Cell 37:767 (1984)).

[0518] The skilled artisan would acknowledge the existence of other “tags” which could be readily substituted for the tags referred to supra for purification and/or identification of polypeptides of the present invention (Jones C., et al., J Chromatogr A. 707(1):3-22 (1995)). For example, the c-myc tag and the 8F9, 3C7, 6E10, G4m B7 and 9E10 antibodies thereto (Evan et al., Molecular and Cellular Biology 5:3610-3616 (1985)); the Herpes Simplex virus glycoprotein D (gD) tag and its antibody (Paborsky et al., Protein Engineering, 3(6):547-553 (1990), the Flag-peptide—i.e., the octapeptide sequence DYKDDDDK (SEQ ID NO:605), (Hopp et al., Biotech. 6:1204-1210 (1988); the KT3 epitope peptide (Martin et al., Science, 255:192-194 (1992)); a-tubulin epitope peptide (Skinner et al., J. Biol. Chem., 266:15136-15166, (1991)); the T7 gene 10 protein peptide tag (Lutz-Freyermuth et al., Proc. Natl. Sci. USA, 87:6363-6397 (1990)), the FITC epitope (Zymed, Inc.), the GFP epitope (Zymed, Inc.), and the Rhodamine epitope (Zymed, Inc.).

[0519] The present invention also encompasses the attachment of up to nine codons encoding a repeating series of up to nine arginine amino acids to the coding region of a polynucleotide of the present invention. The invention also encompasses chemically derivitizing a polypeptide of the present invention with a repeating series of up to nine arginine amino acids. Such a tag, when attached to a polypeptide, has recently been shown to serve as a universal pass, allowing compounds access to the interior of cells without additional derivitization or manipulation (Wender, P., et al., unpublished data).

[0520] Protein fusions involving polypeptides of the present invention, including fragments and/or variants thereof, can be used for the following, non-limiting examples, subcellular localization of proteins, determination of protein-protein interactions via immunoprecipitation, purification of proteins via affinity chromatography, functional and/or structural characterization of protein. The present invention also encompasses the application of hapten specific antibodies for any of the uses referenced above for epitope fusion proteins. For example, the polypeptides of the present invention could be chemically derivatized to attach hapten molecules (e.g., DNP, (Zymed, Inc.)). Due to the availability of monoclonal antibodies specific to such haptens, the protein could be readily purified using immunoprecipation, for example.

[0521] Polypeptides of the present invention, including fragments and/or variants thereof, in addition to, antibodies directed against such polypeptides, fragments, and/or variants, may be fused to any of a number of known, and yet to be determined, toxins, such as ricin, saporin (Mashiba H, et al., Ann. N. Y. Acad. Sci. 1999;886:233-5), or HC toxin (Tonukari N J, et al., Plant Cell. 2000 February;12(2):237-248), for example. Such fusions could be used to deliver the toxins to desired tissues for which a ligand or a protein capable of binding to the polypeptides of the invention exists.

[0522] The invention encompasses the fusion of antibodies directed against polypeptides of the present invention, including variants and fragments thereof, to said toxins for delivering the toxin to specific locations in a cell, to specific tissues, and/or to specific species. Such bifunctional antibodies are known in the art, though a review describing additional advantageous fusions, including citations for methods of production, can be found in P. J. Hudson, Curr. Opp. In. Imm. 11:548-557, (1999); this publication, in addition to the references cited therein, are hereby incorporated by reference in their entirety herein. In this context, the term “toxin” may be expanded to include any heterologous protein, a small molecule, radionucleotides, cytotoxic drugs, liposomes, adhesion molecules, glycoproteins, ligands, cell or tissue-specific ligands, enzymes, of bioactive agents, biological response modifiers, anti-fungal agents, hormones, steroids, vitamins, peptides, peptide analogs, anti-allergenic agents, anti-tubercular agents, anti-viral agents, antibiotics, anti-protozoan agents, chelates, radioactive particles, radioactive ions, X-ray contrast agents, monoclonal antibodies, polyclonal antibodies and genetic material. In view of the present disclosure, one skilled in the art could determine whether any particular “toxin” could be used in the compounds of the present invention. Examples of suitable “toxins” listed above are exemplary only and are not intended to limit the “toxins” that may be used in the present invention.

[0523] Thus, any of these above fusions can be engineered using the polynucleotides or the polypeptides of the present invention.

### Vectors, Host Cells, and Protein Production

[0524] The present invention also relates to vectors containing the polynucleotide of the present invention, host cells, and the production of polypeptides by recombinant techniques. The vector may be, for example, a phage, plasmid, viral, or retroviral vector. Retroviral vectors may be replication competent or replication defective. In the latter case, viral propagation generally will occur only in complementing host cells.

[0525] The polynucleotides may be joined to a vector containing a selectable marker for propagation in a host. Generally, a plasmid vector is introduced in a precipitate, such as a calcium phosphate precipitate, or in a complex with a charged lipid. If the vector is a virus, it may be packaged in vitro using an appropriate packaging cell line and then transduced into host cells.

[0526] The polynucleotide insert should be operatively linked to an appropriate promoter, such as the phage lambda PL promoter, the E. coli lac, trp, phoA and tac promoters, the SV40 early and late promoters and promoters of retroviral LTRs, to name a few. Other suitable promoters will be known to the skilled artisan. The expression constructs will further contain sites for transcription initiation, termination, and, in the transcribed region, a ribosome binding site for translation. The coding portion of the transcripts expressed by the constructs will preferably include a translation initiating codon at the beginning and a termination codon (UAA, UGA or UAG) appropriately positioned at the end of the polypeptide to be translated.

[0527] As indicated, the expression vectors will preferably include at least one selectable marker. Such markers include dihydrofolate reductase, G418 or neomycin resistance for eukaryotic cell culture and tetracycline, kanamycin or ampicillin resistance genes for culturing in E. coli and other bacteria. Representative examples of appropriate hosts include, but are not limited to, bacterial cells, such as E. coli, Streptomyces and Salmonella typhimurium cells; fungal cells, such as yeast cells (e.g., Saccharomyces cerevisiae or Pichia pastoris (ATCC Accession No. 201178)); insect cells such as Drosophila S2 and Spodoptera Sf9 cells; animal cells such as CHO, COS, 293, and Bowes melanoma cells; and plant cells. Appropriate culture mediums and conditions for the above-described host cells are known in the art.

[0528] Among vectors preferred for use in bacteria include pQE70, pQE60 and pQE-9, available from QIAGEN, Inc.; pBluescript vectors, Phagescript vectors, pNH8A, pNH16a, pNH18A, pNH46A, available from Stratagene Cloning Systems, Inc.; and ptrc99a, pKK223-3, pKK233-3, pDR540, pRIT5 available from Pharmacia Biotech, Inc. Among preferred eukaryotic vectors are pWLNEO, pSV2CAT, pOG44, pXT1 and pSG available from Stratagene; and pSVK3, pBPV, pMSG and pSVL available from Pharmacia. Preferred expression vectors for use in yeast systems include, but are not limited to pYES2, pYD1, pTEF1/Zeo, pYES2/GS, pPICZ, pGAPZ, pGAPZalph, pPIC9, pPIC3.5, pHIL-D2, pHIL-S1, pPIC3.5K, pPIC9K, and PAO815 (all available from Invitrogen, Carlsbad, Calif.). Other suitable vectors will be readily apparent to the skilled artisan.

[0529] Introduction of the construct into the host cell can be effected by calcium phosphate transfection, DEAE-dextran mediated transfection, cationic lipid-mediated transfection, electroporation, transduction, infection, or other methods. Such methods are described in many standard laboratory manuals, such as Davis et al., Basic Methods In Molecular Biology (1986). It is specifically contemplated that the polypeptides of the present invention may in fact be expressed by a host cell lacking a recombinant vector.

[0530] A polypeptide of this invention can be recovered and purified from recombinant cell cultures by well-known methods including ammonium sulfate or ethanol precipitation, acid extraction, anion or cation exchange chromatography, phosphocellulose chromatography, hydrophobic interaction chromatography, affinity chromatography, hydroxylapatite chromatography and lectin chromatography. Most preferably, high performance liquid chromatography (“HPLC”) is employed for purification.

[0531] Polypeptides of the present invention, and preferably the secreted form, can also be recovered from: products purified from natural sources, including bodily fluids, tissues and cells, whether directly isolated or cultured; products of chemical synthetic procedures; and products produced by recombinant techniques from a prokaryotic or eukaryotic host, including, for example, bacterial, yeast, higher plant, insect, and mammalian cells. Depending upon the host employed in a recombinant production procedure, the polypeptides of the present invention may be glycosylated or may be non-glycosylated. In addition, polypeptides of the invention may also include an initial modified methionine residue, in some cases as a result of host-mediated processes. Thus, it is well known in the art that the N-terminal methionine encoded by the translation initiation codon generally is removed with high efficiency from any protein after translation in all eukaryotic cells. While the N-terminal methionine on most proteins also is efficiently removed in most prokaryotes, for some proteins, this prokaryotic removal process is inefficient, depending on the nature of the amino acid to which the N-terminal methionine is covalently linked.

[0532] In one embodiment, the yeast Pichia pastoris is used to express the polypeptide of the present invention in a eukaryotic system. Pichia pastoris is a methylotrophic yeast which can metabolize methanol as its sole carbon source. A main step in the methanol metabolization pathway is the oxidation of methanol to formaldehyde using O2. This reaction is catalyzed by the enzyme alcohol oxidase. In order to metabolize methanol as its sole carbon source, Pichia pastoris must generate high levels of alcohol oxidase due, in part, to the relatively low affinity of alcohol oxidase for O2. Consequently, in a growth medium depending on methanol as a main carbon source, the promoter region of one of the two alcohol oxidase genes (AOX1) is highly active. In the presence of methanol, alcohol oxidase produced from the AOX1 gene comprises up to approximately 30% of the total soluble protein in Pichia pastoris. See, Ellis, S. B., et al., Mol. Cell. Biol. 5:1111-21 (1985); Koutz, P. J, et al., Yeast 5:167-77 (1989); Tschopp, J. F., et al., Nucd. Acids Res. 15:3859-76 (1987). Thus, a heterologous coding sequence, such as, for example, a polynucleotide of the present invention, under the transcriptional regulation of all or part of the AOX1 regulatory sequence is expressed at exceptionally high levels in Pichia yeast grown in the presence of methanol.

[0533] In one example, the plasmid vector pPIC9K is used to express DNA encoding a polypeptide of the invention, as set forth herein, in a Pichea yeast system essentially as described in “Pichia Protocols: Methods in Molecular Biology,” D. R. Higgins and J. Cregg, eds. The Humana Press, Totowa, N. J., 1998. This expression vector allows expression and secretion of a protein of the invention by virtue of the strong AOX1 promoter linked to the Pichia pastoris alkaline phosphatase (PHO) secretory signal peptide (i.e., leader) located upstream of a multiple cloning site.

[0534] Many other yeast vectors could be used in place of pPIC9K, such as, pYES2, pYD1, pTEF1/Zeo, pYES2/GS, pPICZ, pGAPZ, pGAPZalpha, pPIC9, pPIC3.5, pHIL-D2, pHIL-S1, pPIC3.5K, and PAO815, as one skilled in the art would readily appreciate, as long as the proposed expression construct provides appropriately located signals for transcription, translation, secretion (if desired), and the like, including an in-frame AUG, as required.

[0535] In another embodiment, high-level expression of a heterologous coding sequence, such as, for example, a polynucleotide of the present invention, may be achieved by cloning the heterologous polynucleotide of the invention into an expression vector such as, for example, pGAPZ or pGAPZalpha, and growing the yeast culture in the absence of methanol.

[0536] In addition to encompassing host cells containing the vector constructs discussed herein, the invention also encompasses primary, secondary, and immortalized host cells of vertebrate origin, particularly manunalian origin, that have been engineered to delete or replace endogenous genetic material (e.g., coding sequence), and/or to include genetic material (e.g., heterologous polynucleotide sequences) that is operably associated with the polynucleotides of the invention, and which activates, alters, and/or amplifies endogenous polynucleotides. For example, techniques known in the art may be used to operably associate heterologous control regions (e.g., promoter and/or enhancer) and endogenous polynucleotide sequences via homologous recombination, resulting in the formation of a new transcription unit (see, e.g., U.S. Pat. No. 5,641,670, issued Jun. 24, 1997; U.S. Pat. No. 5,733,761, issued Mar. 31, 1998; International Publication No. WO 96/29411, published Sep. 26, 1996; International Publication No. WO 94/12650, published Aug. 4, 1994; Koller et al., Proc. Natl. Acad. Sci. USA 86:8932-8935 (1989); and Zijlstra et al., Nature 342:435-438 (1989), the disclosures of each of which are incorporated by reference in their entireties).

[0537] In addition, polypeptides of the invention can be chemically synthesized using techniques known in the art (e.g., see Creighton, 1983, Proteins: Structures and Molecular Principles, W. H. Freeman & Co., N.Y., and Hunkapiller et al., Nature, 310:105-111 (1984)). For example, a polypeptide corresponding to a fragment of a polypeptide sequence of the invention can be synthesized by use of a peptide synthesizer. Furthermore, if desired, nonclassical amino acids or chemical amino acid analogs can be introduced as a substitution or addition into the polypeptide sequence. Non-classical amino acids include, but are not limited to, to the D-isomers of the common amino acids, 2,4-diaminobutyric acid, a-amino isobutyric acid, 4-aminobutyric acid, Abu, 2-amino butyric acid, g-Abu, e-Ahx, 6-amino hexanoic acid, Aib, 2-amino isobutyric acid, 3-amino propionic acid, ornithine, norleucine, norvaline, hydroxyproline, sarcosine, citrulline, homocitrulline, cysteic acid, t-butylglycine, t-butylalanine, phenylglycine, cyclohexylalanine, b-alanine, fluoro-amino acids, designer amino acids such as b-methyl amino acids, Ca-methyl amino acids, Na-methyl amino acids, and amino acid analogs in general. Furthermore, the amino acid can be D (dextrorotary) or L (levorotary).

[0538] The invention encompasses polypeptides which are differentially modified during or after translation, e.g., by glycosylation, acetylation, phosphorylation, amidation, derivatization by known protecting/blocking groups, proteolytic cleavage, linkage to an antibody molecule or other cellular ligand, etc. Any of numerous chemical modifications may be carried out by known techniques, including but not limited, to specific chemical cleavage by cyanogen bromide, trypsin, chymotrypsin, papain, V8 protease, NaBH4; acetylation, formylation, oxidation, reduction; metabolic synthesis in the presence of tunicamycin; etc.

[0539] Additional post-translational modifications encompassed by the invention include, for example, e.g., N-linked or O-linked carbohydrate chains, processing of N-terminal or C-terminal ends), attachment of chemical moieties to the amino acid backbone, chemical modifications of N-linked or O-linked carbohydrate chains, and addition or deletion of an N-terminal methionine residue as a result of prokaryotic host cell expression. The polypeptides may also be modified with a detectable label, such as an enzymatic, fluorescent, isotopic or affinity label to allow for detection and isolation of the protein, the addition of epitope tagged peptide fragments (e.g., FLAG, HA, GST, thioredoxin, maltose binding protein, etc.), attachment of affinity tags such as biotin and/or streptavidin, the covalent attachment of chemical moieties to the amino acid backbone, N- or C-terminal processing of the polypeptides ends (e.g., proteolytic processing), deletion of the N-terminal methionine residue, etc.

[0540] Also provided by the invention are chemically modified derivatives of the polypeptides of the invention which may provide additional advantages such as increased solubility, stability and circulating time of the polypeptide, or decreased immunogenicity (see U.S. Pat. No: 4,179,337). The chemical moieties for derivitization may be selected from water soluble polymers such as polyethylene glycol, ethylene glycol/propylene glycol copolymers, carboxymethylcellulose, dextran, polyvinyl alcohol and the like. The polypeptides may be modified at random positions within the molecule, or at predetermined positions within the molecule and may include one, two, three or more attached chemical moieties.

[0541] The invention further encompasses chemical derivitization of the polypeptides of the present invention, preferably where the chemical is a hydrophilic polymer residue. Exemplary hydrophilic polymers, including derivatives, may be those that include polymers in which the repeating units contain one or more hydroxy groups (polyhydroxy polymers), including, for example, poly(vinyl alcohol); polymers in which the repeating units contain one or more amino groups (polyamine polymers), including, for example, peptides, polypeptides, proteins and lipoproteins, such as albumin and natural lipoproteins; polymers in which the repeating units contain one or more carboxy groups (polycarboxy polymers), including, for example, carboxymethylcellulose, alginic acid and salts thereof, such as sodium and calcium alginate, glycosaminoglycans and salts thereof, including salts of hyaluronic acid, phosphorylated and sulfonated derivatives of carbohydrates, genetic material, such as interleukin-2 and interferon, and phosphorothioate oligomers; and polymers in which the repeating units contain one or more saccharide moieties (polysaccharide polymers), including, for example, carbohydrates.

[0542] The molecular weight of the hydrophilic polymers may vary, and is generally about 50 to about 5,000,000, with polymers having a molecular weight of about 100 to about 50,000 being preferred. The polymers may be branched or unbranched. More preferred polymers have a molecular weight of about 150 to about 10,000, with molecular weights of 200 to about 8,000 being even more preferred.

[0543] For polyethylene glycol, the preferred molecular weight is between about 1 kDa and about 100 kDa (the term “about” indicating that in preparations of polyethylene glycol, some molecules will weigh more, some less, than the stated molecular weight) for ease in handling and manufacturing. Other sizes may be used, depending on the desired therapeutic profile (e.g., the duration of sustained release desired, the effects, if any on biological activity, the ease in handling, the degree or lack of antigenicity and other known effects of the polyethylene glycol to a therapeutic protein or analog).

[0544] Additional preferred polymers which may be used to derivatize polypeptides of the invention, include, for example, poly(ethylene glycol) (PEG), poly(vinylpyrrolidine), polyoxomers, polysorbate and poly(vinyl alcohol), with PEG polymers being particularly preferred. Preferred among the PEG polymers are PEG polymers having a molecular weight of from about 100 to about 10,000. More preferably, the PEG polymers have a molecular weight of from about 200 to about 8,000, with PEG 2,000, PEG 5,000 and PEG 8,000, which have molecular weights of 2,000, 5,000 and 8,000, respectively, being even more preferred. Other suitable hydrophilic polymers, in addition to those exemplified above, will be readily apparent to one skilled in the art based on the present disclosure. Generally, the polymers used may include polymers that can be attached to the polypeptides of the invention via alkylation or acylation reactions.

[0545] The polyethylene glycol molecules (or other chemical moieties) should be attached to the protein with consideration of effects on functional or antigenic domains of the protein. There are a number of attachment methods available to those skilled in the art, e.g., EP 0 401 384, herein incorporated by reference (coupling PEG to G-CSF), see also Malik et al., Exp. Hematol. 20:1028-1035 (1992) (reporting pegylation of GM-CSF using tresyl chloride). For example, polyethylene glycol may be covalently bound through amino acid residues via a reactive group, such as, a free amino or carboxyl-group. Reactive groups are those to which an activated polyethylene glycol molecule may be bound. The amino acid residues having a free amino group may include lysine residues and the N-terminal amino acid residues; those having a free carboxyl group may include aspartic acid residues glutamic acid residues and the C-terminal amino acid residue. Sulfhydryl groups may also be used as a reactive group for attaching the polyethylene glycol molecules. Preferred for therapeutic purposes is attachment at an amino group, such as attachment at the N-terminus or lysine group.

[0546] One may specifically desire proteins chemically modified at the N-terminus. Using polyethylene glycol as an illustration of the present composition, one may select from a variety of polyethylene glycol molecules (by molecular weight, branching, etc.), the proportion of polyethylene glycol molecules to protein (polypeptide) molecules in the reaction mix, the type of pegylation reaction to be performed, and the method of obtaining the selected N-terminally pegylated protein. The method of obtaining the N-terminally pegylated preparation (i.e., separating this moiety from other monopegylated moieties if necessary) may be by purification of the N-terminally pegylated material from a population of pegylated protein molecules. Selective proteins chemically modified at the N-terminus modification may be accomplished by reductive alkylation which exploits differential reactivity of different types of primary amino groups (lysine versus the N-terminus) available for derivatization in a particular protein. Under the appropriate reaction conditions, substantially selective derivatization of the protein at the N-terminus with a carbonyl group containing polymer is achieved.

[0547] As with the various polymers exemplified above, it is contemplated that the polymeric residues may contain functional groups in addition, for example, to those typically involved in linking the polymeric residues to the polypeptides of the present invention. Such functionalities include, for example, carboxyl, amine, hydroxy and thiol groups. These functional groups on the polymeric residues can be further reacted, if desired, with materials that are generally reactive with such functional groups and which can assist in targeting specific tissues in the body including, for example, diseased tissue. Exemplary materials which can be reacted with the additional functional groups include, for example, proteins, including antibodies, carbohydrates, peptides, glycopeptides, glycolipids, lectins, and nucleosides.

[0548] In addition to residues of hydrophilic polymers, the chemical used to derivatize the polypeptides of the present invention can be a saccharide residue. Exemplary saccharides which can be derived include, for example, monosaccharides or sugar alcohols, such as erythrose, threose, ribose, arabinose, xylose, lyxose, fructose, sorbitol, mannitol and sedoheptulose, with preferred monosaccharides being fructose, mannose, xylose, arabinose, mannitol and sorbitol; and disaccharides, such as lactose, sucrose, maltose and cellobiose. Other saccharides include, for example, inositol and ganglioside head groups. Other suitable saccharides, in addition to those exemplified above, will be readily apparent to one skilled in the art based on the present disclosure. Generally, saccharides which may be used for derivitization include saccharides that can be attached to the polypeptides of the invention via alkylation or acylation reactions.

[0549] Moreover, the invention also encompasses derivitization of the polypeptides of the present invention, for example, with lipids (including cationic, anionic, polymerized, charged, synthetic, saturated, unsaturated, and any combination of the above, etc.). stabilizing agents.

[0550] The invention encompasses derivitization of the polypeptides of the present invention, for example, with compounds that may serve a stabilizing function (e.g., to increase the polypeptides half-life in solution, to make the polypeptides more water soluble, to increase the polypeptides hydrophilic or hydrophobic character, etc.). Polymers useful as stabilizing materials may be of natural, semi-synthetic (modified natural) or synthetic origin. Exemplary natural polymers include naturally occurring polysaccharides, such as, for example, arabinans, fructans, fucans, galactans, galacturonans, glucans, mannans, xylans (such as, for example, inulin), levan, fucoidan, carrageenan, galatocarolose, pectic acid, pectins, including amylose, pullulan, glycogen, amylopectin, cellulose, dextran, dextrin, dextrose, glucose, polyglucose, polydextrose, pustulan, chitin, agarose, keratin, chondroitin, dermatan, hyaluronic acid, alginic acid, xanthin gum, starch and various other natural homopolymer or heteropolymers, such as those containing one or more of the following aldoses, ketoses, acids or amines: erythose, threose, ribose, arabinose, xylose, lyxose, allose, altrose, glucose, dextrose, mannose, gulose, idose, galactose, talose, erythrulose, ribulose, xylulose, psicose, fructose, sorbose, tagatose, mannitol, sorbitol, lactose, sucrose, trehalose, maltose, cellobiose, glycine, serine, threonine, cysteine, tyrosine, asparagine, glutamine, aspartic acid, glutamic acid, lysine, arginine, histidine, glucuronic acid, gluconic acid, glucaric acid, galacturonic acid, mannuronic acid, glucosamine, galactosamine, and neuraminic acid, and naturally occurring derivatives thereof Accordingly, suitable polymers include, for example, proteins, such as albumin, polyalginates, and polylactide-coglycolide polymers. Exemplary semi-synthetic polymers include carboxymethylcellulose, hydroxymethylcellulose, hydroxypropylmethylcellulose, methylcellulose, and methoxycellulose. Exemplary synthetic polymers include polyphosphazenes, hydroxyapatites, fluoroapatite polymers, polyethylenes (such as, for example, polyethylene glycol (including for example, the class of compounds referred to as Pluronics.RTM., commercially available from BASF, Parsippany, N.J.), polyoxyethylene, and polyethylene terephthlate), polypropylenes (such as, for example, polypropylene glycol), polyurethanes (such as, for example, polyvinyl alcohol (PVA), polyvinyl chloride and polyvinylpyrrolidone), polyamides including nylon, polystyrene, polylactic acids, fluorinated hydrocarbon polymers, fluorinated carbon polymers (such as, for example, polytetrafluoroethylene), acrylate, methacrylate, and polymethylmethacrylate, and derivatives thereof. Methods for the preparation of derivatized polypeptides of the invention which employ polymers as stabilizing compounds will be readily apparent to one skilled in the art, in view of the present disclosure, when coupled with information known in the art, such as that described and referred to in Unger, U.S. Pat. No. 5,205,290, the disclosure of which is hereby incorporated by reference herein in its entirety.

[0551] Moreover, the invention encompasses additional modifications of the polypeptides of the present invention. Such additional modifications are known in the art, and are specifically provided, in addition to methods of derivitization, etc., in U.S. Pat. No. 6,028,066, which is hereby incorporated in its entirety herein.

[0552] The polypeptides of the invention may be in monomers or multimers (i.e., dimers, trimers, tetramers and higher multimers). Accordingly, the present invention relates to monomers and multimers of the polypeptides of the invention, their preparation, and compositions (preferably, Therapeutics) containing them. In specific embodiments, the polypeptides of the invention are monomers, dimers, trimers or tetramers. In additional embodiments, the multimers of the invention are at least dimers, at least trimers, or at least tetramers.

[0553] Multimers encompassed by the invention may be homomers or heteromers. As used herein, the term homomer, refers to a multimer containing only polypeptides corresponding to the amino acid sequence of SEQ ID NO:6, 8, 10, 12, 14, 16, 18, 20, 22, 24, 26, 28, 30, 32, 34, 36, 38, 40, 42, 44, 46, 48, 50, and/or 604 (including fragments, variants, splice variants, and fusion proteins, corresponding to these polypeptides as described herein). These homomers may contain polypeptides having identical or different amino acid sequences. In a specific embodiment, a homomer of the invention is a multimer containing only polypeptides having an identical amino acid sequence. In another specific embodiment, a homomer of the invention is a multimer containing polypeptides having different amino acid sequences. In specific embodiments, the multimer of the invention is a homodimer (e.g., containing polypeptides having identical or different amino acid sequences) or a homotrimer (e.g., containing polypeptides having identical and/or different amino acid sequences). In additional embodiments, the homomeric multimer of the invention is at least a homodimer, at least a homotrimer, or at least a homotetramer.

[0554] As used herein, the term heteromer refers to a multimer containing one or more heterologous polypeptides (i.e., polypeptides of different proteins) in addition to the polypeptides of the invention. In a specific embodiment, the multimer of the invention is a heterodimer, a heterotrimer, or a heterotetramer. In additional embodiments, the heteromeric multimer of the invention is at least a heterodimer, at least a heterotrimer, or at least a heterotetramer.

[0555] Multimers of the invention may be the result of hydrophobic, hydrophilic, ionic and/or covalent associations and/or may be indirectly linked, by for example, liposome formation. Thus, in one embodiment, multimers of the invention, such as, for example, homodimers or homotrimers, are formed when polypeptides of the invention contact one another in solution. In another embodiment, heteromultimers of the invention, such as, for example, heterotrimers or heterotetramers, are formed when polypeptides of the invention contact antibodies to the polypeptides of the invention (including antibodies to the heterologous polypeptide sequence in a fusion protein of the invention) in solution. In other embodiments, multimers of the invention are formed by covalent associations with and/or between the polypeptides of the invention. Such covalent associations may involve one or more amino acid residues contained in the polypeptide sequence (e.g., that recited in the sequence listing). In one instance, the covalent associations are cross-linking between cysteine residues located within the polypeptide sequences which interact in the native (i.e., naturally occurring) polypeptide. In another instance, the covalent associations are the consequence of chemical or recombinant manipulation. Alternatively, such covalent associations may involve one or more amino acid residues contained in the heterologous polypeptide sequence in a fusion protein of the invention.

[0556] In one example, covalent associations are between the heterologous sequence contained in a fusion protein of the invention (see, e.g., U.S. Pat. No. 5,478,925). In a specific example, the covalent associations are between the heterologous sequence contained in an Fc fusion protein of the invention (as described herein). In another specific example, covalent associations of fusion proteins of the invention are between heterologous polypeptide sequence from another protein that is capable of forming covalently associated multimers, such as for example, osteoprotegerin (see, e.g., International Publication NO: WO 98/49305, the contents of which are herein incorporated by reference in its entirety). In another embodiment, two or more polypeptides of the invention are joined through peptide linkers. Examples include those peptide linkers described in U.S. Pat. No. 5,073,627 (hereby incorporated by reference). Proteins comprising multiple polypeptides of the invention separated by peptide linkers may be produced using conventional recombinant DNA technology.

[0557] Another method for preparing multimer polypeptides of the invention involves use of polypeptides of the invention fused to a leucine zipper or isoleucine zipper polypeptide sequence. Leucine zipper and isoleucine zipper domains are polypeptides that promote multimerization of the proteins in which they are found. Leucine zippers were originally identified in several DNA-binding proteins (Landschulz et al., Science 240:1759, (1988)), and have since been found in a variety of different proteins. Among the known leucine zippers are naturally occurring peptides and derivatives thereof that dimerize or trimerize. Examples of leucine zipper domains suitable for producing soluble multimeric proteins of the invention are those described in PCT application WO 94/10308, hereby incorporated by reference. Recombinant fusion proteins comprising a polypeptide of the invention fused to a polypeptide sequence that dimerizes or trimerizes in solution are expressed in suitable host cells, and the resulting soluble multimeric fusion protein is recovered from the culture supernatant using techniques known in the art.

[0558] Trimeric polypeptides of the invention may offer the advantage of enhanced biological activity. Preferred leucine zipper moieties and isoleucine moieties are those that preferentially form trimers. One example is a leucine zipper derived from lung surfactant protein D (SPD), as described in Hoppe et al. (FEBS Letters 344:191, (1994)) and in U.S. patent application Ser. No. 08/446,922, hereby incorporated by reference. Other peptides derived from naturally occurring trimeric proteins may be employed in preparing trimeric polypeptides of the invention.

[0559] In another example, proteins of the invention are associated by interactions between Flag® polypeptide sequence contained in fusion proteins of the invention containing Flag® polypeptide sequence. In a further embodiment, associations proteins of the invention are associated by interactions between heterologous polypeptide sequence contained in Flag® fusion proteins of the invention and anti-Flag® antibody.

[0560] The multimers of the invention may be generated using chemical techniques known in the art. For example, polypeptides desired to be contained in the multimers of the invention may be chemically cross-linked using linker molecules and linker molecule length optimization techniques known in the art (see, e.g., U.S. Pat. No. 5,478,925, which is herein incorporated by reference in its entirety). Additionally, multimers of the invention may be generated using techniques known in the art to form one or more inter-molecule cross-links between the cysteine residues located within the sequence of the polypeptides desired to be contained in the multimer (see, e.g., U.S. Pat. No. 5,478,925, which is herein incorporated by reference in its entirety). Further, polypeptides of the invention may be routinely modified by the addition of cysteine or biotin to the C terminus or N-terminus of the polypeptide and techniques known in the art may be applied to generate multimers containing one or more of these modified polypeptides (see, e.g., U.S. Pat. No. 5,478,925, which is herein incorporated by reference in its entirety). Additionally, techniques known in the art may be applied to generate liposomes containing the polypeptide components desired to be contained in the multimer of the invention (see, e.g., U.S. Pat. No. 5,478,925, which is herein incorporated by reference in its entirety).

[0561] Alternatively, multimers of the invention may be generated using genetic engineering techniques known in the art. In one embodiment, polypeptides contained in multimers of the invention are produced recombinantly using fusion protein technology described herein or otherwise known in the art (see, e.g., U.S. Pat. No. 5,478,925, which is herein incorporated by reference in its entirety). In a specific embodiment, polynucleotides coding for a homodimer of the invention are generated by ligating a polynucleotide sequence encoding a polypeptide of the invention to a sequence encoding a linker polypeptide and then further to a synthetic polynucleotide encoding the translated product of the polypeptide in the reverse orientation from the original C-terminus to the N-terminus (lacking the leader sequence) (see, e.g., U.S. Pat. No. 5,478,925, which is herein incorporated by reference in its entirety). In another embodiment, recombinant techniques described herein or otherwise known in the art are applied to generate recombinant polypeptides of the invention which contain a transmembrane domain (or hydrophobic or signal peptide) and which can be incorporated by membrane reconstitution techniques into liposomes (see, e.g., U.S. Pat. No. 5,478,925, which is herein incorporated by reference in its entirety).

[0562] In addition, the polynucleotide insert of the present invention could be operatively linked to “artificial” or chimeric promoters and transcription factors. Specifically, the artificial promoter could comprise, or alternatively consist, of any combination of cis-acting DNA sequence elements that are recognized by trans-acting transcription factors. Preferably, the cis acting DNA sequence elements and trans-acting transcription factors are operable in mammals. Further, the trans-acting transcription factors of such “artificial” promoters could also be “artificial” or chimeric in design themselves and could act as activators or repressors to said “artificial” promoter.

### Methods of Use of The Allelic Polynucleotides and Polypeptides of the Present Invention

[0563] The determination of the polymorphic form(s) present in an individual at one or more polymorphic sites defined herein can be used in a number of methods.

[0564] In preferred embodiments, the polynucleotides and polypeptides of the present invention, including allelic and variant forms thereof, have uses which include, but are not limited to diagnosing individuals to identify whether a given individual has increased susceptibility or risk for liver disease, high cholesterol levels, myocardial infarction, resistance to statin drugs, particularly pravastatin, etc.

[0565] In another embodiment, the polynucleotides and polypeptides of the present invention, including allelic and variant forms thereof, either alone,or in combination with other polymorphic polynucleotides (haplotypes) are useful as genetic markers.

[0566] In preferred embodiments, the polynucleotides and polypeptides of the present invention, including allelic and variant forms thereof, have uses which include, but are not limited to diagnosing individuals to identify whether a given individual has increased susceptibility or risk for other conditions such as high cholesterol levels, and myocardial infarction using the genotype assays of the present invention, and diagnosing individuals to identify whether a given individual, upon administration of a statin, preferably pravastatin, and/or any other statin known in the art or described herein, has increased susceptibility or risk for high cholesterol levels, or myocardial infarction using the genotype assays of the present invention.

[0567] The polynucleotides and polypeptides of the present invention, including allelic and/or variant forms thereof, are useful for creating recombinant vectors and hosts cells for the expression of variant forms of the polypeptides of the present invention.

[0568] The polynucleotides and polypeptides of the present invention, including allelic and/or variant forms thereof, are useful for creating antagonists directed against these polynucleotides and polypeptides, particularly antibody antagonists, for diagnostic, and/or therapeutic applications.

[0569] Additionally, the polynucleotides and polypeptides of the present invention, including allelic and/or variant forms thereof, are useful for creating additional antagonists directed against these polynucleotides and polypeptides, which include, but are not limited to the design of antisense RNA, ribozymes, PNAs, recombinant zinc finger proteins (Wolfe, S A., Ramm, E I., Pabo, C O, Structure, Fold, Des., 8(7):739-50, (2000); Kang, J S., Kim, J S, J. Biol, Chem., 275(12):8742-8, (2000); Wang, B S., Pabo, C O, Proc, Natl, Acad, Sci, U.S.A., 96(17):9568-73, (1999); McColl, D J., Honchell, C D., Frankel, A D, Proc, Natl, Acad, Sci, U.S.A., 96(17):9521-6, (1999); Segal, D J., Dreier, B., Beerli, R R., Barbas, CF-3rd, Proc, Natl, Acad, Sci, U.S.A., 96(6):2758-63, (1999); Wolfe, S A., Greisman, H A., Ramm, E I., Pabo, C O, J. Mol, Biol., 285(5):1917-34, (1999); Pomerantz, J L., Wolfe, S A., Pabo, C O, Biochemistry., 37(4):965-70, (1998); Leon, O., Roth, M., Biol. Res. 33(1):21-30 (2000); Berg, J M., Godwin, H A, Ann. Rev. Biophys. Biomol. Struct., 26:357-71 (1997)), in addition to other types of antagonists which are either described elsewhere herein, or known in the art.

[0570] The polynucleotides and polypeptides of the present invention, including allelic and/or variant forms thereof, are useful for creating small molecule antagonists directed against the variant forms of these polynucleotides and polypeptides, preferably wherein such small molecules are useful as therapeutic and/or pharmaceutical compounds for the treatment, detection, prognosis, and/or prevention of the following, nonlimiting diseases and/or disorders, metabolic dieases, cardiovascular diseases, inflammatory diseases, high cholesterol, hypertension, and congestive heart failure.

[0571] The polynucleotides and polypeptides of the present invention, including allelic and/or variant forms thereof, are useful for the treatment of high cholesterol, myocardial infarction, hypertension, congestive heart failure, in addition to other diseases and/or conditions referenced elsewhere herein, through the application of gene therapy based regimens.

[0572] Agonists and/or antagonists of the polynucleotides and polypeptides of the present invention, including allelic and/or variant forms thereof, are useful for increasing or decreasing the flow of compounds transported by an organic anion transporter.

[0573] Agonists and/or antagonists of the polynucleotides and polypeptides of the present invention, including allelic and/or variant forms thereof, are useful for increasing or decreasing the flow of compounds transported by an organic anion transporter in the liver.

[0574] Agonists and/or antagonists of the polynucleotides and polypeptides of the present invention, including allelic and/or variant forms thereof, are useful for treating liver disease.

[0575] The polynucleotides and polypeptides of the present invention, including allelic and/or variant forms thereof, are useful in assays for identification of organic anion transport positive and negative modulators (i.e., agonists and/or antagonists) and organic anion transport carriers. The term “positive modulator” as used herein refers to an agent or compound that increases the rate or amount of transport of a compound into an organ, e.g., the liver, or an agent or compound that decreases the rate or amount of transport of a compound into an organ. The term “negative modulator” refers to a compound that is joined to a second compound to prevent the second compounds transport into or out of cells. The term “carrier” as used herein refers to an agent or compound that is transported by an OATP of the present invention and that is capable of being joined to or associated with another compound to chaperone that other compound into an organ, e.g., the liver. A carrier includes an agent that is used to transport a compound into an organ that is otherwise not transported into said organ, and includes an agent that increases the transport of a compound into an organ that is capable of being transported by an OATP.

[0576] The polynucleotides and polypeptides of the present invention, including allelic and/or variant forms thereof, are useful for treating coronary heart disease (CHD), identifying individuals at risk of CHD, and modulating low-density lipoprotein cholesterol (LDL-C).

[0577] Antagonists of the polynucleotides and polypeptides of the present invention are useful for patients that have been administered an anti-cancer, or anti-tumor, regimen, as such antagonists may increase the efficacy of such a regimen by diminishing the level of anti-cancer, or anti-tumor drug that is transported out of the cancer or tumor cells.

[0578] The polynucleotides and polypeptides of the present invention, including allelic and/or variant forms thereof, are useful detecting and/or predicting an individual's response to pravastatin treatment for LDL-cholesterol reduction, the an individual's response to pravastatin treatment for coronary artery disease prevention, an individual's response to HMG-CoA reductase inhibitors for LDL-cholesterol reduction, an individual's response to HMG-CoA reductase inhibitors for coronary artery disease prevention, an individual's response to drugs that use OATP2 for hepatic or cellular uptake, the prediction of the toxic effect of chemical compounds that use OATP2 for hepatic or cellular uptake, and/or an individual's response to xenobiotics that use OATP2 for hepatic or cellular uptake.

[0579] Prediction of pathogenesis of conditions mediated through endogenous compounds that use OATP2 for hepatic or cellular uptake, including but not limited to taurocholate, estrone sulfate, estradiol 17-D-glucuronide, leukotriene C4, prostaglandin E2, and thyroid hormone.

[0580] The polynucleotides and polypeptides of the present invention, including allelic and/or variant forms thereof, are useful for detecting and/or predicting the extent of hepatic statin uptake, preferably pravastatin, in dyslipidemic patients.

[0581] The polynucleotides and polypeptides of the present invention, including allelic and/or variant forms thereof, are useful for detecting and/or predicting LDL (low-density lipoprotein) and TG (tri-glyceride) lowering, and/or HDL (high-density lipoprotein) elevation in response to statin treatment, preferably pravastatin, in dyslipidemic patients.

[0582] The polynucleotides and polypeptides of the present invention, including allelic and/or variant forms thereof, are useful for detecting and/or predicting drug-drug interactions between two drugs that utilize OATP2 for uptake into hepatocytes. For example, polynucleotides and polypeptides of the present invention, including allelic and/or variant forms thereof, are useful for detecting and/or predicting drug-drug interactions between pravastatin, lovastatin, cerivastatin, simvastatin, pitivastatin, atorvastatin or rousuvastatin, and any other drug transported by OATP2.

[0583] The polynucleotides and polypeptides of the present invention, including allelic and/or variant forms thereof, are useful for detecting and/or predicting drug-endogenous substrate interactions between a drug and endogenous substance both of whom utilize OATP2 for uptake into hepatocytes. For example, polynucleotides and polypeptides of the present invention, including allelic and/or variant forms thereof, are useful for detecting and/or predicting drug-endogenous substrate interactions statins, which include, but are not limited to, pravastatin, lovastatin, cerivastatin, simvastatin, pitivastatin, atorvastatin or rousuvastatin, and any other endogenous substrate of OATP2 including cholate, taurocholate, thyroid hormones T3 and T4, DHEAS, estradiol-17beta-glucuronide, estrone-3-sulfate, prostaglandin E2, thromboxane B2, leukotriene C4, leukotriene E4, and bilirubin and its conjugates.

[0584] The polynucleotides and polypeptides of the present invention, including allelic and/or variant forms thereof, are useful for detecting and/or predicting the extent of hepatic statin clearance in dyslipidemic patients.

[0585] The polynucleotides and polypeptides of the present invention, including allelic and/or variant forms thereof, are useful for detecting and/or predicting drug-drug interactions between two drugs that utilize cMOAT for clearance out of the liver into the bile. For example, the polynucleotides and polypeptides of the present invention, including allelic and/or variant forms thereof, are useful for detecting and/or predicting drug interactions between pravastatin, lovastatin, cerivastatin, simvastatin, pitivastatin, atorvastatin or rousuvastatin, and any other drug transported by cMOAT.

[0586] The polynucleotides and polypeptides of the present invention, including allelic and/or variant forms thereof, are useful for detecting and/or predicting drug-endogenous substrate interactions between a drug and endogenous substance both of whom utilize cMOAT for clearance out of the liver into the bile. For example, the polynucleotides and polypeptides of the present invention, including allelic and/or variant forms thereof, are useful for detecting and/or predicting drug interactions between statins, which include, but are not limited to, pravastatin, lovastatin, cerivastatin, simvastatin, pitivastatin, atorvastatin or rousuvastatin, and any other endogenous substrate of OATP2 including cholate, taurocholate, thyroid hormones T3 and T4, DHEAS, estradiol-17beta-glucuronide, estrone-3-sulfate, prostaglandin E2, thromboxane B2, leukotriene C4, leukotriene E4, and bilirubin and its conjugates.

[0587] The polynucleotides and polypeptides of the present invention, including allelic and/or variant forms thereof, are useful for detecting and/or predicting the extent of removal of anti-tumor cytotoxic drugs from tumor cells (i.e. drug resistance) that express cMOAT in cancer patients during chemotherapy. For example, the polynucleotides and polypeptides of the present invention, including allelic and/or variant forms thereof, are useful for detecting and/or predicting the extent of removal of anti-tumor cytotoxic drugs from tumor cells, which include, for example, the following, non-limiting cytotoxic drugs including methotrexate, doxirubicin, cisplatin, CPT-11, SN-38, vincristine, and etoposide, in addition to any other cytotoxic drugs that may be transported by cMOAT and/or OATP2.

[0588] The polynucleotides and polypeptides of the present invention, including allelic and/or variant forms thereof, are useful for detecting and/or predicting response of cancer patients to anti-tumor therapy with drugs that are removed from tumor cells by cMOAT. For example, the polynucleotides and polypeptides of the present invention, including allelic and/or variant forms thereof, are useful for detecting and/or predicting the response of cancer patients to anti-tumor therapy with drugs that are removed from tumor cells by cMOAT, which include, for example, the following, non-limiting anti-tumor drugs including methotrexate, doxirubicin, cisplatin, CPT-11, SN-38, vincristine, and etoposide, in addition to the response by a patient to any other cytotoxic drugs that may be transported by cMOAT and/or OATP2.

[0589] Additional uses of the polynucleotides and polypeptides of the present invention are provided herein.

### A. Forensics

[0590] Determination of which polymorphic forms occupy a set of polymorphic sites in an individual identifies a set of polymorphic forms that distinguishes the individual. See generally National Research Council, The Evaluation of Forensic DNA Evidence (Eds. Pollard et al., National Academy Press, DC, 1996). The more sites that are analyzed, the lower the probability that the set of polymorphic forms in one individual is the same as that in an unrelated individual. Preferably, if multiple sites are analyzed, the sites are unlinked. Thus, polymorphisms of the invention are often used in conjunction with polymorphisms in distal genes. Preferred polymorphisms for use in forensics are biallelic because the population frequencies of two polymorphic forms can usually be determined with greater accuracy than those of multiple polymorphic forms at multi-allelic loci.

[0591] The capacity to identify a distinguishing or unique set of forensic markers in an individual is useful for forensic analysis. For example, one can determine whether a blood sample from a suspect matches a blood or other tissue sample from a crime scene by determining whether the set of polymorphic forms occupying selected polymorphic sites is the same in the suspect and the sample. If the set of polymorphic markers does not match between a suspect and a sample, it can be concluded (barring experimental eITor) that the suspect was not the source of the sample. If the set of markers does match, one can conclude that the DNA from the suspect is consistent with that found at the crime scene. If frequencies of the polymorphic forms at the loci tested have been determined (e.g., by analysis of a suitable population of individuals), one can perform a statistical analysis to determine the probability that a match of suspect and crime scene sample would occur by chance.

[0592] p(ID) is the probability that two random individuals have the same polymorphic or allelic form at a given polymorphic site. In biallelic loci, four genotypes are possible: AA, AB, BA, and BB. If alleles A and B occur in a haploid genome of the organism with frequencies x and y, the probability of each genotype in a diploid organism is (see WO 95/12607):

Homozygote: p(AA)=x²

Homozygote: p(BB)=y²=(1−x)²

Single Heterozygote: p(AB)=p(BA)=xy=x(1−x)

Both Heterozygotes: p(AB+BA)=2xy=2x(1−x)

[0593] The probability of identity at one locus (i.e., the probability that two individuals, picked at random from a population will have identical polymorphic forms at a given locus) is given by the equation:

p(ID)=(x²)²+(2xy)²+(y²)².

[0594] These calculations can be extended for any number of polymorphic forms at a given locus. For example, the probability of identity p(m) for a 3-allele system where the alleles have the frequencies in the population of x, y and z, respectively, is equal to the sum of the squares of the genotype frequencies:

p(ID)=x⁴+(2xy)²+(2yz)²+(2xz)²+z⁴+y⁴

[0595] In a locus of n alleles, the appropriate binomial expansion is used to calculate p(ID) and p(exc).

[0596] The cumulative probability of identity (cum p(ID)) for each of multiple unlinked loci is determined by multiplying the probabilities provided by each locus.

cum p(ID)=p(ID1)p(ID2)p(ID3) . . . p(IDn)

[0597] The cumulative probability of non-identity for n loci (i.e. the probability that two random individuals will be different at lor more loci) is given by the equation:

cum p(non1D)=1−cum p(ID).

[0598] If several polymorphic loci are tested, the cumulative probability of non-identity for random individuals becomes very high (e.g., one billion to one). Such probabilities can be taken into account together with other evidence in determining the guilt or innocence of the suspect.

### B. Paternity Testing

[0599] The object of paternity testing is usually to determine whether a male is the father of a child. In most cases, the mother of the child is known and thus, the mother's contribution to the child's genotype can be traced. Paternity testing investigates whether the part of the child's genotype not attributable to the mother is consistent with that of the putative father. Paternity testing can be performed by analyzing sets of polymorphisms in the putative father and the child.

[0600] If the set of polymorphisms in the child attributable to the father does not match the set of polymorphisms of the putative father, it can be concluded, barring experimental error, that the putative father is not the real father.

[0601] If the set of polymorphisms in the child attributable to the father does match the set of polymorphisms of the putative father, a statistical calculation can be performed to determine the probability of coincidental match.

[0602] The probability of parentage exclusion (representing the probability that a random male will have a polymorphic form at a given polymorphic site that makes him incompatible as the father) is given by the equation (see WQ 95/12607):

p(exc)=xy(1−xy)

[0603] where x and y are the population frequencies of alleles A and B of a biallelic polymorphic site.

(At a triallelic site p(exc)=xy(1−xy)+yz(1−yz)+xz(1−xz)+3xyz(1−xyz))),

[0604] where x, y and z and the respective population frequencies of alleles A, B and C).

[0605] The probability of non-exclusion is

p(non−exc)=1−p(exc)

[0606] The cumulative probability ofnon-exclusion (representing the value obtained when n loci are used) is thus:

cum p(non−exc)=p(non−exc1)p(non−exc2)p(non−exc3) . . . p(non−excn)

[0607] The cumulative probability of exclusion for n loci (representing the probability that a random male will be excluded)

cum p(exc)=1−cum p(non−exc).

[0608] If several polymorphic loci are included in the analysis, the cumulative probability of exclusion of a random male is very high. This probability can be taken into account in assessing the liability of a putative father whose polymorphic marker set matches the child's polymorphic marker set attributable to his/her father.

### C. Correlation of Polymorphisms with Phenotypic Traits

[0609] The polymorphisms of the invention may contribute to the phenotype of an organism in different ways. Some polymorphisms occur within a protein coding sequence and contribute to phenotype by affecting protein structure. The effect may be neutral, beneficial or detrimental, or both beneficial and detrimental, depending on the circumstances. For example, a heterozygous sickle cell mutation confers resistance to malaria, but a homozygous sickle cell mutation is usually lethal. Other polymorphisms occur in noncoding regions but may exert phenotypic effects indirectly via influence on replication, transcription, and translation. A single polymorphism may affect more than one phenotypic trait. Likewise, a single phenotypic trait may be affected by polymorphisms in different genes. Further, some polymorphisms predispose an individual to a distinct mutation that is causally related to a certain phenotype.

[0610] Phenotypic traits include diseases that have known but hitherto unmapped genetic components (e.g., agammaglobulimenia, diabetes insipidus, Lesch-Nyhan syndrome, muscular dystrophy, Wiskott-Aldrich syndrome, Fabry's disease, familial hypercholesterolemia, polycystic kidney disease, hereditary spherocytosis, von Willebrand's disease, tuberous sclerosis, hereditary hemorrhagic telangiectasia, familial colonic polyposis, Ehlers-Danlos syndrome, osteogenesis imperfecta, and acute intermittent porphyria). Phenotypic traits also include symptoms of, or susceptibility to, multifactorial diseases of which a component is or may be genetic, such as autoimmune diseases, inflammation, cancer, diseases of the nervous system, and infection by pathogenic microorganisms. Some examples of autoimmune diseases include rheumatoid arthritis, multiple sclerosis, diabetes (insulin-dependent and non-independent), systemic lupus erythematosus and Graves disease. Some examples of cancers include cancers of the bladder, brain, breast, colon, esophagus, kidney, leukemia, liver, lung, oral cavity, ovary, pancreas, prostate, skin, stomach and uterus. Phenotypic traits also include characteristics such as longevity, appearance (e.g., baldness, obesity), strength, speed, endurance, fertility, and susceptibility or receptivity to particular drugs or therapeutic treatments.

[0611] The correlation of one or more polymorphisms with phenotypic traits can be facilitated by knowledge of the gene product of the wild type (reference) gene. The genes in which SNPs of the present invention have been identified are genes which have been previously sequenced and characterized in one of their allelic forms. Thus, the SNPs of the invention can be used to identify correlations between one or another allelic form of the gene with a disorder with which the gene is associated, thereby identifying causative or predictive allelic forms of the gene.

[0612] Correlation is performed for a population of individuals who have been tested for the presence or absence of a phenotypic trait of interest and for polymorphic markers sets. T o perform such analysis, the presence or absence of a set of polymorphisms (i.e. a polymorphic set) is detennined for a set of the individuals, some ofwhom exhibit a particular trait, and some ofwhich exhibit lack of the trait. The alleles of each polymorphism of the set are then reviewed to determine whether the presence or absence of a particular allele is associated with the trait of interest. Correlation can be performed by standard statistical methods such as a 1C-squared test and statistically significant correlations between polymorphic form(s) and phenotypic characteristics are noted. For example, it might be found that the presence of allele A1 at polymorphism A correlates with heart disease. As a further example, it might be found that the combined presence of allele A1 at polymorphism A and allele B 1 at polymorphism B correlates with increased milk production of a farm animal.

[0613] Such correlations can be exploited in several ways. In the case of a strong correlation between a set of one or more polymorphic forms and a disease for which treatment is available, detection of the polymorphic form set in a human or animal patient may justify immediate administration of treatment, or at least the institution of regular monitoring of the patient. Detection of a polymorphic form correlated with serious disease in a couple contemplating a family may also be valuable to the couple in their reproductive decisions. For example, the female partner might elect to undergo in vitro fertilization to avoid the possibility of transmitting such a polymorphism from her husband to her offspring. In the case of a weaker, but still statistically significant correlation between a polymorphic set and human disease, immediate therapeutic intervention or monitoring may not be justified. Nevertheless, the patient can be motivated to begin simple life-style changes (e.g., diet, exercise) that can be accomplished at little cost to the patient but confer potential benefits in reducing the risk of conditions to which the patient may have increased susceptibility by virtue of variant alleles. Identification of a polymorphic set in a patient correlated with enhanced receptiveness to one of several treatment regimes for a disease indicates that this treatment regime should be followed.

[0614] For animals and plants, correlations between characteristics and phenotype are useful for breeding for desired characteristics. For example, Beitz et al, U.S. Pat. No. 5,292,639 discuss use of bovine mitochondrial polymorphisms in a breeding program to improve milk production in cows. To evaluate the effect of mtDNA D-loop sequence polymorphism on milk production, each cow was assigned a value of 1 ifvariant or 0 if wildtype with respect to a prototypical mitochondrial DNA sequence at each of 10 locations considered. Each production trait was analyzed individually with the following animal model:

Yᵢⱼₖₚₙ=υ+YSᵢ+Pⱼ+Xₖ+β₁+ . . . β₁₇+PEₙ+aₙ+eₚ

[0615] where Yᵢⱼₖₚₙ is the milk, fat, fat percentage, SNF , SNF percentage, energy concentration, or lactation energy record; υ is an overall mean; YSᵢ is the effect common to all cows calving in year-season; Xₖ is the effect common to cows in either the high or average selection line; β₁ to β₁₇ are the binomial regressions of production record on mtDNA D- loop sequence polymorphisms; PEₙ is permanent environmental effect common to all records of cow n; aₙ is effect of animal n and is composed of the additive genetic contribution of sire and dam breeding values and a Mendelian sampling effect; and eₚ is a random residual. It was found that eleven of seventeen polymorphisms tested influenced at least one production trait. Bovines having the best polymorphic forms for milk production at these eleven loci are used as parents for breeding the next generation of the herd.

### D. Genetic Mapping of Phenotypic Traits

[0616] The previous section concerns identifying correlations between phenotypic traits and polymorphisms that directly or indirectly contribute to those traits. The present section describes identification of a physical linkage between a genetic locus associated with a trait of interest and polymorphic markers that are not associated with the trait, but are in physical proximity with the genetic locus responsible for the trait and cosegregate with it. Such analysis is useful for mapping a genetic locus associated with a phenotypic trait to a chromosomal position, and thereby cloning gene(s) responsible for the trait. See Lander et al., Proc. Natl. Acad. Sci. (USA) 83:7353-7357 (1986); Lander et al., Proc. Natl. Acad. Sci. (USA)84:2363-2367 (1987); Donis-Keller et al., Cell 51:319-337 (1987); Lander et al., Genetics 121:185-199 (1989)). Genese localized by linkage can be cloned by a process known as directional cloning. See Winwright, Med. J. Australia 159:170-174 (1993); Collins, Nature Genetics 1:3-6 (1992).

[0617] Linkage studies are typically performed on members of a family. Available mmbers of the family are characterized for the presence or absence of a phenotypic trait and for a set of polymorhic markers. The distribution of polymorphic markers in an informative meiosis is then analyzed to determine which polymorphic markers cosegregate with a phenotypic trait. See, e.g., Kerem et al., Science 245:1073-1080 (1989); Monaco et al., Nature 316:842 (1985); Yamoka et al., Neurology 40:222-226 (1990); Rossiter et al., FASEB Journal, 5:21-27 (1991).

[0618] Linkage is analyzed by calculation of LOD (log of the odds) values. A LOS value is the realtive likelihood of obtaining oberved segregation data for a marker and a genetic locus when the ewo are located at a recombination fraction θ, versus the situtation in which the two are not linked, and thus segregating independetly (Thompson & Thompson, Genetics in Medicine (5th ed, W.B. Saunders Company, Philadelphia, 1991); Strachan, “Mapping the human genome” in The Human Gneome (BIOS Scientic Publishers Ltd, Oxford), Chapter 4). A series of likelihoos ratios are calculated at various recombination fractions (θ), ranging from θ=0.0 (coincident loci) to θ=0.50 (unlinked). Thus, the likelihoos ata given value of θ is: probability of data if loci linked at θ to probability of data if loci are unlinked. The computed likelihoods are usually expressed as the log10 of this ratio (i.e., a LOD score). For example, a LOD score of 3 indicates 1000:1 odds against an apparent obsered linkage being a coincidence. The use of logarithms allos data collected from different familites to be combined by simple algorithm. Computer programs are available for the calculation of LOD scores for differing values of θ (e.g., LIPED, MLINK (Lathrop, Proc. Nat. Acad. Sci. (USA)81, 3443-3446 (1984)). For any particular lod score, a recombination fraction may be determined from mathematical tables. See Smith et al., lvlathematical tables for research workers in human genetics (Churchill, London, 1961); Smith, Ann. Hum. Genet. 32,127-150 (1968). The value of θ at which the lod score is the highest is considered to be the best estimate of the recombination fraction. Positive lod score values suggest that the two loci are linked, whereas negative values suggest that linkage is less likely (at that value of θ) than the possibility that the two loci are unlinked. By convention, a combined lod score of +3 or greater ( equivalent to greater than 1000: 1 odds in favor of linkage) is considered definitive evidence that two loci are linked. Similarly, by convention, a negative lod score of −2 or less is taken as definitive evidence against linkage of the two loci being compared. Negative linkage data are useful in excluding a chromosome or a segment thereof from consideration. The search focuses on the remaining non-excluded chromosomal locations.

### IV. Modified Polypeptides and Gene Sequences

[0619] The invention further provides variant forms of nucleic acids and corresponding proteins. The nucleic acids comprise one of the sequences described in Table I, IV, V, or the polynucleotides encoding the polypeptides described in Table VI, in which the polymorphic position is occupied by one of the alternative bases for that position. Some nucleic acids encode full-length variant forms of proteins. Variant genes can be expressed in an expression vector in which a variant gene is operably linked to a native or other promoter. Usually, the promoter is a eukaryotic promoter for expression in a mammalian cell. The transcription regulation sequences typically include a heterologous promoter and optionally an enhancer which is recognized by the host. The selection of an appropriate promoter, for example trp, lac, phage promoters, glycolytic enzyme promoters and tRNA promoters, depends on the host selected. Commercially available expression vectors can be used. Vectors can include host-recognized replication systems, amplifiable genes, selectable markers, host sequences useful for insertion into the host genome, and the like.

[0620] The means of introducing the expression construct into a host cell varies depending upon the particular construction and the target host. Suitable means include fusion, conjugation, transfection, transduction, electroporation or injection, as described in Sambrook, supra. A wide variety of host cells can be employed for expression of the variant gene, both prokaryotic and eukaryotic. Suitable host cells include bacteria such as E. coli, yeast, filamentous fungi, insect cells, mammalian cells, typically immortalized, e.g. , mouse, CHO, human and monkey cell lines and derivatives thereof. Preferred host cells are able to process the variant gene product to produce an appropriate mature polypeptide. Processing includes glycosylation, ubiquitination, disulfide bond formation, general post-translational modification, and the like. As used herein, “gene product” includes mRNA, peptide and protein products.

[0621] The protein may be isolated by conventional means of protein biochemistry and purification to obtain a substantially pure product, i.e., 80,95 or 99% free of cell component contaminants, as described in Jacoby, Methods in Enzymology Volume 104, Academic Press, New York (1984); Scopes, Protein Purification, Principles and Practice, 2nd Edition, Springer-Verlag, New York (1987); and Deutscher (ed), Guide to Protein Purification, Methods in Enzymology, Vol. 182 (1990). If the protein is secreted, it can be isolated from the supernatant in which the host cell is grown. If not secreted, the protein can be isolated from a lysate of the host cells.

[0622] The invention further provides transgenic nonhuman animals capable of expressing an exogenous variant gene and/or having one or both alleles of an endogenous variant gene inactivated. Expression of an exogenous variant gene is usually achieved by operably linking the gene to a promoter and optionally an enhancer, and microinjecting the construct into a zygote. See Hogan et al., “Manipulating the Mouse Embryo, A Laboratory Manual,” Cold Spring Harbor Laboratory Inactivation of endogenous variant genes can be achieved by forming a trans gene in which a cloned variant gene is inactivated by insertion ofa positive selection marker. See Capecchi, Science 244, 1288-1292 (1989). The trans gene is then introduced into an embryonic stem cell, where it undergoes homologous recombination with an endogenous variant gene. Mice and other rodents are preferred animals. Such animals provide useful drug screening systems.

[0623] In addition to substantially full-length polypeptides expressed by variant genes, the present invention includes biologically active fragments of the polypeptides, or analogs thereof, including organic molecules which simulate the interactions of the peptides. Biologically active fragments include any portion of the full-length polypeptide which confers a biological function on the variant gene product, including ligand binding, and antibody binding. Ligand binding includes binding by nucleic acids, proteins or polypeptides, small biologically active molecules, or large cellular structures.

[0624] Polyclonal and/or monoclonal antibodies that specifically bind to variant gene products but not to corresponding prototypical gene products are also provided. Antibodies can be made by injecting mice or other animals with the variant gene product or synthetic peptide fragments thereof. Monoclonal antibodies are screened as are described, for example, in Harlow & Lane, Antibodies, A Laboratory Manual, Cold Spring Harbor Press, New York (1988); Goding, Monoclonal antibodies, Principles and Practice (2d ed.) Academic Press, New York (1986). Monoclonal antibodies are tested for specific immunoreactivity with a variant gene product and lack of immunoreactivity to the corresponding prototypical gene product. These antibodies are useful in diagnostic assays for detection of the variant form, or as an active ingredient in a pharmaceutical composition.

### V. Haplotype Based Genetic Analysis

[0625] The invention further provides methods of applying the polynucleotides and polypeptides of the present invention to the elucidation of haplotypes. Such haplotypes may be associated with any one or more of the disease conditions referenced elsewhere herein. A “haplotype” is defined as the pattern of a set of alleles of single nucleotide polymorphisms along a chromosome. For example, consider the case of three single nucleotide polymorphisms (SNP1, SNP2, and SNP3) in one chromosome region, of which SNP1 is an A/G polymorphism, SNP2 is a G/C polymorphism, and SNP3 is an A/C polymorphism. A and G are the alleles for the first, G and C for the second and A and C for the third SNP. Given two alleles for each SNP, there are three possible genotypes for individuals at each SNP. For example, for the first SNP, A/A, A/G and G/G are the possible genotypes for individuals. When an individual has a genotype for a SNP in which the alleles are not the same, for example A/G for the first SNP, then the individual is a heterozygote. When an individual has an A/G genotype at SNP1, G/C genotype at SNP2, and A/C genotype at SNP3 (FIG. 39), there are four possible combinations of haplotypes (A, B, C, and D) for this individual. The set of SNP genotypes of this individual alone would not provide sufficient information to resolve which combination of haplotypes this individual possesses. However, when this individual's parents' genotypes are available, haplotypes could then be assigned unambiguously. For example, if one parent had an A/A genotype at SNP1, a G/C genotype at SNP2, and an A/A genotype at SNP3, and the other parent had an A/G genotype at SNP1, C/C genotype at SNP2, and C/C genotype at SNP3, while the child was a heterozygote at all three SNPs (FIG. 40), there is only one possible haplotype combination, assuming there was no crossing over in this region during meiosis.

[0626] When the genotype information of relatives is not available, haplotype assignment can be done using the long range-PCR method (Clark, A. G. Mol Biol Evol 7(2): 111-22 (1990); Clark, A. G., K. M. Weiss, et al. Am J Hum Genet 63(2): 595-612 (1998); Fullerton, S. M., A. G. Clark, et al., Am J Hum. Genet 67(4): 881-900 (2000); Templeton, A. R., A. G. Clark, et al., Am J Hum Genet 66(1): 69-83 (2000)). When the genotyping result of the SNPs of interest are available from general population samples, the most likely haplotypes can also be assigned using statistical methods (Excoffier, L. and M. Slatkin. Mol Biol Evol 12(5): 921-7 (1995); Fallin, D. and N. J. Schork, Am J Hum Genet 67(4): 947-59 (2000); Long, J. C., R. C. Williams, et al., Am J Hum Genet 56(3): 799-810 (1995)).

[0627] Once an individual's haplotype in a certain chromosome region (i.e., locus) has been determined, it can be used as a tool for genetic association studies using different methods, which include, for example, haplotype relative risk analysis (Knapp, M., S. A. Seuchter, et al., Am J Hum Genet 52(6): 1085-93 (1993); Li, T., M. Arranz, et al., Schizophr Res 32(2): 87-92 (1998); Matise, T. C., Genet Epidemiol 12(6): 641-5 (1995); Ott, J., Genet Epidemiol 6(1): 127-30 (1989); Terwilliger, J. D. and J. Ott, Hum Hered 42(6): 337-46 (1992)). Haplotype based genetic analysis, using a combination of SNPs, provides increased detection sensitivity, and hence statistical significance, for genetic associations of diseases, as compared to analyses using individual SNPs as markers. Multiple SNPs present in a single gene or a continuous chromosomal region are useful for such haplotype-based analyses.

### VI. Kits

[0628] The invention further provides kits comprising at least one agent for identifying which alleleic form of the SNPs identified herein is present in a sample. For example, suitable kits can comprise at least one antibody specific for a particular protein or peptide encoded by one alleleic form of the gene, or allele-specific oligonucleotide as described herein. Often, the kits contain one or more pairs of allele-specific oligonucleotides hybridizing to different forms of a polymorphism. In some kits, the allele-specific oligonucleotides are provided immobilized to a substrate. For example, the same substrate can comprise allele-specific oligonucleotide probes for detecting at least 1, 10, 100 or all of the polymorphisms shown in Tables I, IV, V, or VI. Optional additional components of the kit include, for example, restriction enzymes, reverse-transcriptase or polymerase, the substrate nucleoside triphosphates, means used to label (for example, an avidin-enzyme conjugate and enzyme substrate and chromogen if the label is biotin), and the appropriate buffers for reverse transcription, PCR, or hybridization reactions. Usually, the kit also contains instructions for carrying out the methods.

### Uses of the Polynucleotides

[0629] Each of the polynucleotides identified herein can be used in numerous ways as reagents. The following description should be considered exemplary and utilizes known techniques.

[0630] The polynucleotides of the present invention are useful for chromosome identification. There exists an ongoing need to identify new chromosome markers, since few chromosome marking reagents, based on actual sequence data (repeat polymorphisms), are presently available. Each polynucleotide of the present invention can be used as a chromosome marker.

[0631] Briefly, sequences can be mapped to chromosomes by preparing PCR primers (preferably 15-25 bp) from the sequences shown in SEQ ID NO:5, 7, 9, 11, 13, 15, 17, 19, 21, 23, 25, 27, 29, 31, 33, 35, 37, 39, 41, 43, 45, 47, 49, and/or 603. Primers can be selected using computer analysis so that primers do not span more than one predicted exon in the genomic DNA. These primers are then used for PCR screening of somatic cell hybrids containing individual human chromosomes. Only those hybrids containing the human gene corresponding to the SEQ ID NO:5, 7, 9, 11, 13, 15, 17, 19, 21, 23, 25, 27, 29, 31, 33, 35, 37, 39, 41, 43, 45, 47, 49, and/or 603 will yield an amplified fragment.

[0632] Similarly, somatic hybrids provide a rapid method of PCR mapping the polynucleotides to particular chromosomes. Three or more clones can be assigned per day using a single thermal cycler. Moreover, sublocalization of the polynucleotides can be achieved with panels of specific chromosome fragments. Other gene mapping strategies that can be used include in situ hybridization, prescreening with labeled flow-sorted chromosomes, and preselection by hybridization to construct chromosome specific-cDNA libraries.

[0633] Precise chromosomal location of the polynucleotides can also be achieved using fluorescence in situ hybridization (FISH) of a metaphase chromosomal spread. This technique uses polynucleotides as short as 500 or 600 bases; however, polynucleotides 2,000-4,000 bp are preferred. For a review of this technique, see Verma et al., “Human Chromosomes: a Manual of Basic Techniques,” Pergamon Press, New York (1988).

[0634] For chromosome mapping, the polynucleotides can be used individually (to mark a single chromosome or a single site on that chromosome) or in panels (for marking multiple sites and/or multiple chromosomes). Preferred polynucleotides correspond to the noncoding regions of the cDNAs because the coding sequences are more likely conserved within gene families, thus increasing the chance of cross hybridization during chromosomal mapping.

[0635] Once a polynucleotide has been mapped to a precise chromosomal location, the physical position of the polynucleotide can be used in linkage analysis. Linkage analysis establishes coinheritance between a chromosomal location and presentation of a particular disease. Disease mapping data are known in the art. Assuming 1 megabase mapping resolution and one gene per 20 kb, a cDNA precisely localized to a chromosomal region associated with the disease could be one of 50-500 potential causative genes.

[0636] Thus, once coinheritance is established, differences in the polynucleotide and the corresponding gene between affected and unaffected organisms can be examined. First, visible structural alterations in the chromosomes, such as deletions or translocations, are examined in chromosome spreads or by PCR. If no structural alterations exist, the presence of point mutations are ascertained. Mutations observed in some or all affected organisms, but not in normal organisms, indicates that the mutation may cause the disease. However, complete sequencing of the polypeptide and the corresponding gene from several normal organisms is required to distinguish the mutation from a polymorphism. If a new polymorphism is identified, this polymorphic polypeptide can be used for further linkage analysis.

[0637] Furthermore, increased or decreased expression of the gene in affected organisms as compared to unaffected organisms can be assessed using polynucleotides of the present invention. Any of these alterations (altered expression, chromosomal rearrangement, or mutation) can be used as a diagnostic or prognostic marker.

[0638] Thus, the invention also provides a diagnostic method useful during diagnosis of a disorder, involving measuring the expression level of polynucleotides of the present invention in cells or body fluid from an organism and comparing the measured gene expression level with a standard level of polynucleotide expression level, whereby an increase or decrease in the gene expression level compared to the standard is indicative of a disorder.

[0639] By “measuring the expression level of a polynucleotide of the present invention” is intended qualitatively or quantitatively measuring or estimating the level of the polypeptide of the present invention or the level of the mRNA encoding the polypeptide in a first biological sample either directly (e.g., by determining or estimating absolute protein level or mRNA level) or relatively (e.g., by comparing to the polypeptide level or mRNA level in a second biological sample). Preferably, the polypeptide level or mRNA level in the first biological sample is measured or estimated and compared to a standard polypeptide level or mRNA level, the standard being taken from a second biological sample obtained from an individual not having the disorder or being determined by averaging levels from a population of organisms not having a disorder. As will be appreciated in the art, once a standard polypeptide level or mRNA level is known, it can be used repeatedly as a standard for comparison.

[0640] By “biological sample” is intended any biological sample obtained from an organism, body fluids, cell line, tissue culture, or other source which contains the polypeptide of the present invention or mRNA. As indicated, biological samples include body fluids (such as the following non-limiting examples, sputum, amniotic fluid, urine, saliva, breast milk, secretions, interstitial fluid, blood, serum, spinal fluid, etc.) which contain the polypeptide of the present invention, and other tissue sources found to express the polypeptide of the present invention. Methods for obtaining tissue biopsies and body fluids from organisms are well known in the art. Where the biological sample is to include mRNA, a tissue biopsy is the preferred source.

[0641] The method(s) provided above may Preferably be applied in a diagnostic method and/or kits in which polynucleotides and/or polypeptides are attached to a solid support. In one exemplary method, the support may be a “gene chip” or a “biological chip” as described in U.S. Pat. Nos. 5,837,832, 5,874,219, and 5,856,174. Further, such a gene chip with polynucleotides of the present invention attached may be used to identify polymorphisms between the polynucleotide sequences, with polynucleotides isolated from a test subject. The knowledge of such polymorphisms (i.e. their location, as well as, their existence) would be beneficial in identifying disease loci for many disorders, including proliferative diseases and conditions. Such a method is described in U.S. Pat. Nos. 5,858,659 and 5,856,104. The U.S. Patents referenced supra are hereby incorporated by reference in their entirety herein.

[0642] The present invention encompasses polynucleotides of the present invention that are chemically synthesized, or reproduced as peptide nucleic acids (PNA), or according to other methods known in the art. The use of PNAs would serve as the preferred form if the polynucleotides are incorporated onto a solid support, or gene chip. For the purposes of the present invention, a peptide nucleic acid (PNA) is a polyamide type of DNA analog and the monomeric units for adenine, guanine, thymine and cytosine are available commercially (Perceptive Biosystems). Certain components of DNA, such as phosphorus, phosphorus oxides, or deoxyribose derivatives, are not present in PNAs. As disclosed by P. E. Nielsen, M. Egholm, R. H. Berg and O. Buchardt, Science 254, 1497 (1991); and M. Egholm, O. Buchardt, L. Christensen, C. Behrens, S. M. Freier, D. A. Driver, R. H. Berg, S. K. Kim, B. Norden, and P. E. Nielsen, Nature 365, 666 (1993), PNAs bind specifically and tightly to complementary DNA strands and are not degraded by nucleases. In fact, PNA binds more strongly to DNA than DNA itself does. This is probably because there is no electrostatic repulsion between the two strands, and also the polyamide backbone is more flexible. Because of this, PNA/DNA duplexes bind under a wider range of stringency conditions than DNA/DNA duplexes, making it easier to perform multiplex hybridization. Smaller probes can be used than with DNA due to the stronger binding characteristics of PNA:DNA hybrids. In addition, it is more likely that single base mismatches can be determined with PNA/DNA hybridization because a single mismatch in a PNA/DNA 15-mer lowers the melting point (T.sub.m) by 8°-20° C., vs. 4°-16° C. for the DNA/DNA 15-mer duplex. Also, the absence of charge groups in PNA means that hybridization can be done at low ionic strengths and reduce possible interference by salt during the analysis.

[0643] In addition to the foregoing, a polynucleotide can be used to control gene expression through triple helix formation or antisense DNA or RNA. Antisense techniques are discussed, for example, in Okano, J. Neurochem. 56: 560 (1991); “Oligodeoxynucleotides as Antisense Inhibitors of Gene Expression, CRC Press, Boca Raton, FL (1988). Triple helix formation is discussed in, for instance Lee et al., Nucleic Acids Research 6: 3073 (1979); Cooney et al., Science 241: 456 (1988); and Dervan et al., Science 251: 1360 (1991). Both methods rely on binding of the polynucleotide to a complementary DNA or RNA. For these techniques, preferred polynucleotides are usually oligonucleotides 20 to 40 bases in length and complementary to either the region of the gene involved in transcription (triple helix—see Lee et al., Nucl. Acids Res. 6:3073 (1979); Cooney et al., Science 241:456 (1988); and Dervan et al., Science 251:1360 (1991) ) or to the mRNA itself (antisense—Okano, J. Neurochem. 56:560 (1991); Oligodeoxy-nucleotides as Antisense Inhibitors of Gene Expression, CRC Press, Boca Raton, FL (1988).) Triple helix formation optimally results in a shut-off of RNA transcription from DNA, while antisense RNA hybridization blocks translation of an mRNA molecule into polypeptide. Both techniques are effective in model systems, and the information disclosed herein can be used to design antisense or triple helix polynucleotides in an effort to treat or prevent disease.

[0644] The present invention encompasses the addition of a nuclear localization signal, operably linked to the 5′ end, 3′ end, or any location therein, to any of the oligonucleotides, antisense oligonucleotides, triple helix oligonucleotides, ribozymes, PNA oligonucleotides, and/or polynucleotides, of the present invention. See, for example, G. Cutrona, et al., Nat. Biotech., 18:300-303, (2000); which is hereby incorporated herein by reference.

[0645] Polynucleotides of the present invention are also useful in gene therapy. One goal of gene therapy is to insert a normal gene into an organism having a defective gene, in an effort to correct the genetic defect. The polynucleotides disclosed in the present invention offer a means of targeting such genetic defects in a highly accurate manner. Another goal is to insert a new gene that was not present in the host genome, thereby producing a new trait in the host cell. In one example, polynucleotide sequences of the present invention may be used to construct chimeric RNA/DNA oligonucleotides corresponding to said sequences, specifically designed to induce host cell mismatch repair mechanisms in an organism upon systemic injection, for example (Bartlett, R. J., et al., Nat. Biotech, 18:615-622 (2000), which is hereby incorporated by reference herein in its entirety). Such RNA/DNA oligonucleotides could be designed to correct genetic defects in certain host strains, and/or to introduce desired phenotypes in the host (e.g., introduction of a specific polymorphism within an endogenous gene corresponding to a polynucleotide of the present invention that may ameliorate and/or prevent a disease symptom and/or disorder, etc.). Alternatively, the polynucleotide sequence of the present invention may be used to construct duplex oligonucleotides corresponding to said sequence, specifically designed to correct genetic defects in certain host strains, and/or to introduce desired phenotypes into the host (e.g., introduction of a specific polymorphism within an endogenous gene corresponding to a polynucleotide of the present invention that may ameliorate and/or prevent a disease symptom and/or disorder, etc). Such methods of using duplex oligonucleotides are known in the art and are encompassed by the present invention (see EP1007712, which is hereby incorporated by reference herein in its entirety).

[0646] The polynucleotides are also useful for identifying organisms from minute biological samples. The United States military, for example, is considering the use of restriction fragment length polymorphism (RFLP) for identification of its personnel. In this technique, an individual's genomic DNA is digested with one or more restriction enzymes, and probed on a Southern blot to yield unique bands for identifying personnel. This method does not suffer from the current limitations of “Dog Tags” which can be lost, switched, or stolen, making positive identification difficult. The polynucleotides of the present invention can be used as additional DNA markers for RFLP.

[0647] The polynucleotides of the present invention can also be used as an alternative to RFLP, by determining the actual base-by-base DNA sequence of selected portions of an organisms genome. These sequences can be used to prepare PCR primers for amplifying and isolating such selected DNA, which can then be sequenced. Using this technique, organisms can be identified because each organism will have a unique set of DNA sequences. Once an unique ID database is established for an organism, positive identification of that organism, living or dead, can be made from extremely small tissue samples. Similarly, polynucleotides of the present invention can be used as polymorphic markers, in addition to, the identification of transformed or non-transformed cells and/or tissues.

[0648] There is also a need for reagents capable of identifying the source of a particular tissue. Such need arises, for example, when presented with tissue of unknown origin. Appropriate reagents can comprise, for example, DNA probes or primers specific to particular tissue prepared from the sequences of the present invention. Panels of such reagents can identify tissue by species and/or by organ type. In a similar fashion, these reagents can be used to screen tissue cultures for contamination. Moreover, as mentioned above, such reagents can be used to screen and/or identify transformed and non-transformed cells and/or tissues.

[0649] In the very least, the polynucleotides of the present invention can be used as molecular weight markers on Southern gels, as diagnostic probes for the presence of a specific mRNA in a particular cell type, as a probe to “subtract-out” known sequences in the process of discovering novel polynucleotides, for selecting and making oligomers for attachment to a “gene chip” or other support, to raise anti-DNA antibodies using DNA immunization techniques, and as an antigen to elicit an immune response.

### Uses of the Polypeptides

[0650] Each of the polypeptides identified herein can be used in numerous ways. The following description should be considered exemplary and utilizes known techniques.

[0651] A polypeptide of the present invention can be used to assay protein levels in a biological sample using antibody-based techniques. For example, protein expression in tissues can be studied with classical immunohistological methods. (Jalkanen, M., et al., J. Cell. Biol. 101:976-985 (1985); Jalkanen, M., et al., J. Cell . Biol. 105:3087-3096 (1987).) Other antibody-based methods useful for detecting protein gene expression include immunoassays, such as the enzyme linked immunosorbent assay (ELISA) and the radioimmunoassay (RIA). Suitable antibody assay labels are known in the art and include enzyme labels, such as, glucose oxidase, and radioisotopes, such as iodine (125I, 121I), carbon (14C), sulfur (35S), tritium (3H), indium (112In), and technetium (99mTc), and fluorescent labels, such as fluorescein and rhodamine, and biotin.

[0652] In addition to assaying protein levels in a biological sample, proteins can also be detected in vivo by imaging. Antibody labels or markers for in vivo imaging of protein include those detectable by X-radiography, NMR or ESR. For X-radiography, suitable labels include radioisotopes such as barium or cesium, which emit detectable radiation but are not overtly harmful to the subject. Suitable markers for NMR and ESR include those with a detectable characteristic spin, such as deuterium, which may be incorporated into the antibody by labeling of nutrients for the relevant hybridoma.

[0653] A protein-specific antibody or antibody fragment which has been labeled with an appropriate detectable imaging moiety, such as a radioisotope (for example, 131I, 112In, 99mTc), a radio-opaque substance, or a material detectable by nuclear magnetic resonance, is introduced (for example, parenterally, subcutaneously, or intraperitoneally) into the mammal. It will be understood in the art that the size of the subject and the imaging system used will determine the quantity of imaging moiety needed to produce diagnostic images. In the case of a radioisotope moiety, for a human subject, the quantity of radioactivity injected will normally range from about 5 to 20 millicuries of 99 mTc. The labeled antibody or antibody fragment will then preferentially accumulate at the location of cells which contain the specific protein. In vivo tumor imaging is described in S. W. Burchiel et al., “Immunopharmacokinetics of Radiolabeled Antibodies and Their Fragments.” (Chapter 13 in Tumor Imaging: The Radiochemical Detection of Cancer, S. W. Burchiel and B. A. Rhodes, eds., Masson Publishing Inc. (1982).) Thus, the invention provides a diagnostic method of a disorder, which involves (a) assaying the expression of a polypeptide of the present invention in cells or body fluid of an individual; (b) comparing the level of gene expression with a standard gene expression level, whereby an increase or decrease in the assayed polypeptide gene expression level compared to the standard expression level is indicative of a disorder. With respect to cancer, the presence of a relatively high amount of transcript in biopsied tissue from an individual may indicate a predisposition for the development of the disease, or may provide a means for detecting the disease prior to the appearance of actual clinical symptoms. A more definitive diagnosis of this type may allow health professionals to employ preventative measures or aggressive treatment earlier thereby preventing the development or further progression of the cancer.

[0654] Moreover, polypeptides of the present invention can be used to treat, prevent, and/or diagnose disease. For example, patients can be administered a polypeptide of the present invention in an effort to replace absent or decreased levels of the polypeptide (e.g., insulin), to supplement absent or decreased levels of a different polypeptide (e.g., hemoglobin S for hemoglobin B, SOD, catalase, DNA repair proteins), to inhibit the activity of a polypeptide (e.g., an oncogene or tumor suppressor), to activate the activity of a polypeptide (e.g., by binding to a receptor), to reduce the activity of a membrane bound receptor by competing with it for free ligand (e.g., soluble TNF receptors used in reducing inflammation), or to bring about a desired response (e.g., blood vessel growth inhibition, enhancement of the immune response to proliferative cells or tissues).

[0655] Similarly, antibodies directed to a polypeptide of the present invention can also be used to treat, prevent, and/or diagnose disease. For example, administration of an antibody directed to a polypeptide of the present invention can bind and reduce overproduction of the polypeptide. Similarly, administration of an antibody can activate the polypeptide, such as by binding to a polypeptide bound to a membrane (receptor).

[0656] At the very least, the polypeptides of the present invention can be used as molecular weight markers on SDS-PAGE gels or on molecular sieve gel filtration columns using methods well known to those of skill in the art. Polypeptides can also be used to raise antibodies, which in turn are used to measure protein expression from a recombinant cell, as a way of assessing transformation of the host cell. Moreover, the polypeptides of the present invention can be used to test the following biological activities.

### Gene Therapy Methods

[0657] Another aspect of the present invention is to gene therapy methods for treating or preventing disorders, diseases and conditions. The gene therapy methods relate to the introduction of nucleic acid (DNA, RNA and antisense DNA or RNA) sequences into an animal to achieve expression of a polypeptide of the present invention. This method requires a polynucleotide which codes for a polypeptide of the invention that operatively linked to a promoter and any other genetic elements necessary for the expression of the polypeptide by the target tissue. Such gene therapy and delivery techniques are known in the art, see, for example, WO90/11092, which is herein incorporated by reference.

[0658] Thus, for example, cells from a patient may be engineered with a polynucleotide (DNA or RNA) comprising a promoter operably linked to a polynucleotide of the invention ex vivo, with the engineered cells then being provided to a patient to be treated with the polypeptide. Such methods are well-known in the art. For example, see Belldegrun et al., J. Natl. Cancer Inst., 85:207-216 (1993); Ferrantini et al., Cancer Research, 53:107-1112 (1993); Ferrantini et al., J. Immunology 153: 4604-4615 (1994); Kaido, T., et al., Int. J. Cancer 60: 221-229 (1995); Ogura et al., Cancer Research 50: 5102-5106 (1990); Santodonato, et al., Human Gene Therapy 7:1-10 (1996); Santodonato, et al., Gene Therapy 4:1246-1255 (1997); and Zhang, et al., Cancer Gene Therapy 3: 31-38 (1996)), which are herein incorporated by reference. In one embodiment, the cells which are engineered are arterial cells. The arterial cells may be reintroduced into the patient through direct injection to the artery, the tissues surrounding the artery, or through catheter injection.

[0659] As discussed in more detail below, the polynucleotide constructs can be delivered by any method that delivers injectable materials to the cells of an animal, such as, injection into the interstitial space of tissues (heart, muscle, skin, lung, liver, and the like). The polynucleotide constructs may be delivered in a pharmaceutically acceptable liquid or aqueous carrier.

[0660] In one embodiment, the polynucleotide of the invention is delivered as a naked polynucleotide. The term “naked” polynucleotide, DNA or RNA refers to sequences that are free from any delivery vehicle that acts to assist, promote or facilitate entry into the cell, including viral sequences, viral particles, liposome formulations, lipofectin or precipitating agents and the like. However, the polynucleotides of the invention can also be delivered in liposome formulations and lipofectin formulations and the like can be prepared by methods well known to those skilled in the art. Such methods are described, for example, in U.S. Pat. Nos. 5,593,972, 5,589,466, and 5,580,859, which are herein incorporated by reference.

[0661] The polynucleotide vector constructs of the invention used in the gene therapy rnethod are preferably constructs that will not integrate into the host genome nor will they contain sequences that allow for replication. Appropriate vectors include pWLNEO, pSV2CAT, pOG44, pXT1 and pSG available from Stratagene; pSVK3, pBPV, pMSG and pSVL available from Pharmacia; and pEF1/V5, pcDNA3.1, and pRc/CMV2 available from Invitrogen. Other suitable vectors will be readily apparent to the skilled artisan.

[0662] Any strong promoter known to those skilled in the art can be used for driving the expression of polynucleotide sequence of the invention. Suitable promoters include adenoviral promoters, such as the adenoviral major late promoter; or heterologous promoters, such as the cytomegalovirus (CMV) promoter; the respiratory syncytial virus (RSV) promoter; inducible promoters, such as the MMT promoter, the metallothionein promoter; heat shock promoters; the albumin promoter; the ApoAI promoter; human globin promoters; viral thymidine kinase promoters, such as the Herpes Simplex thymidine kinase promoter; retroviral LTRs; the b-actin promoter; and human growth hormone promoters. The promoter also may be the native promoter for the polynucleotides of the invention.

[0663] Unlike other gene therapy techniques, one major advantage of introducing naked nucleic acid sequences into target cells is the transitory nature of the polynucleotide synthesis in the cells. Studies have shown that non-replicating DNA sequences can be introduced into cells to provide production of the desired polypeptide for periods of up to six months.

[0664] The polynucleotide construct of the invention can be delivered to the interstitial space of tissues within the an animal, including of muscle, skin, brain, lung, liver, spleen, bone marrow, thymus, heart, lymph, blood, bone, cartilage, pancreas, kidney, gall bladder, stomach, intestine, testis, ovary, uterus, rectum, nervous system, eye, gland, and connective tissue. Interstitial space of the tissues comprises the intercellular, fluid, mucopolysaccharide matrix among the reticular fibers of organ tissues, elastic fibers in the walls of vessels or chambers, collagen fibers of fibrous tissues, or that same matrix within connective tissue ensheathing muscle cells or in the lacunae of bone. It is similarly the space occupied by the plasma of the circulation and the lymph fluid of the lymphatic channels. Delivery to the interstitial space of muscle tissue is preferred for the reasons discussed below. They may be conveniently delivered by injection into the tissues comprising these cells. They are preferably delivered to and expressed in persistent, non-dividing cells which are differentiated, although delivery and expression may be achieved in non-differentiated or less completely differentiated cells, such as, for example, stem cells of blood or skin fibroblasts. In vivo muscle cells are particularly competent in their ability to take up and express polynucleotides.

[0665] For the naked nucleic acid sequence injection, an effective dosage amount of DNA or RNA will be in the range of from about 0.05 mg/kg body weight to about 50 mg/kg body weight. Preferably the dosage will be from about 0.005 mg/kg to about 20 mg/kg and more preferably from about 0.05 mg/kg to about 5 mg/kg. Of course, as the artisan of ordinary skill will appreciate, this dosage will vary according to the tissue site of injection. The appropriate and effective dosage of nucleic acid sequence can readily be determined by those of ordinary skill in the art and may depend on the condition being treated and the route of administration.

[0666] The preferred route of administration is by the parenteral route of injection into the interstitial space of tissues. However, other parenteral routes may also be used, such as, inhalation of an aerosol formulation particularly for delivery to lungs or bronchial tissues, throat or mucous membranes of the nose. In addition, naked DNA constructs can be delivered to arteries during angioplasty by the catheter used in the procedure.

[0667] The naked polynucleotides are delivered by any method known in the art, including, but not limited to, direct needle injection at the delivery site, intravenous injection, topical administration, catheter infusion, and so-called “gene guns”. These delivery methods are known in the art.

[0668] The constructs may also be delivered with delivery vehicles such as viral sequences, viral particles, liposome formulations, lipofectin, precipitating agents, etc. Such methods of delivery are known in the art.

[0669] In certain embodiments, the polynucleotide constructs of the invention are complexed in a liposome preparation. Liposomal preparations for use in the instant invention include cationic (positively charged), anionic (negatively charged) and neutral preparations. However, cationic liposomes are particularly preferred because a tight charge complex can be formed between the cationic liposome and the polyanionic nucleic acid. Cationic liposomes have been shown to mediate intracellular delivery of plasmid DNA (Felgner et al., Proc. Natl. Acad. Sci. USA 84:7413-7416 (1987), which is herein incorporated by reference); mRNA (Malone et al., Proc. Natl. Acad. Sci. USA , 86:6077-6081 (1989), which is herein incorporated by reference); and purified transcription factors (Debs et al., J. Biol. Chem., 265:10189-10192 (1990), which is herein incorporated by reference), in functional form.

[0670] Cationic liposomes are readily available. For example, N[1-2,3-dioleyloxy)propyl]-N,N,N-triethylammonium (DOTMA) liposomes are particularly useful and are available under the trademark Lipofectin, from GIBCO BRL, Grand Island, N.Y. (See, also, Felgner et al., Proc. Natl. Acad. Sci. USA , 84:7413-7416 (1987), which is herein incorporated by reference). Other commercially available liposomes include transfectace (DDAB/DOPE) and DOTAP/DOPE (Boehringer).

[0671] Other cationic liposomes can be prepared from readily available materials using techniques well known in the art. See, e.g. PCT Publication NO: WO 90/11092 (which is herein incorporated by reference) for a description of the synthesis of DOTAP (1,2-bis(oleoyloxy)-3-(trimethylammonio)propane) liposomes. Preparation of DOTMA liposomes is explained in the literature, see, e.g., Felgner et al., Proc. Natl. Acad. Sci. USA, 84:7413-7417, which is herein incorporated by reference. Similar methods can be used to prepare liposomes from other cationic lipid materials.

[0672] Similarly, anionic and neutral liposomes are readily available, such as from Avanti Polar Lipids (Birmingham, Ala.), or can be easily prepared using readily available materials. Such materials include phosphatidyl, choline, cholesterol, phosphatidyl ethanolamine, dioleoylphosphatidyl choline (DOPC), dioleoylphosphatidyl glycerol (DOPG), dioleoylphoshatidyl ethanolamine (DOPE), among others. These materials can also be mixed with the DOTMA and DOTAP starting materials in appropriate ratios. Methods for making liposomes using these materials are well known in the art.

[0673] For example, commercially dioleoylphosphatidyl choline (DOPC), dioleoylphosphatidyl glycerol (DOPG), and dioleoylphosphatidyl ethanolamine (DOPE) can be used in various combinations to make conventional liposomes, with or without the addition of cholesterol. Thus, for example, DOPG/DOPC vesicles can be prepared by drying 50 mg each of DOPG and DOPC under a stream of nitrogen gas into a sonication vial. The sample is placed under a vacuum pump overnight and is hydrated the following day with deionized water. The sample is then sonicated for 2 hours in a capped vial, using a Heat Systems model 350 sonicator equipped with an inverted cup (bath type) probe at the maximum setting while the bath is circulated at 15EC. Alternatively, negatively charged vesicles can be prepared without sonication to produce multilamellar vesicles or by extrusion through nucleopore membranes to produce unilamellar vesicles of discrete size. Other methods are known and available to those of skill in the art.

[0674] The liposomes can comprise multilamellar vesicles (MLVs), small unilamellar vesicles (SUVs), or large unilamellar vesicles (LUVs), with SUVs being preferred. The various liposome-nucleic acid complexes are prepared using methods well known in the art. See, e.g., Straubinger et al., Methods of Immunology, 101:512-527 (1983), which is herein incorporated by reference. For example, MLVs containing nucleic acid can be prepared by depositing a thin film of phospholipid on the walls of a glass tube and subsequently hydrating with a solution of the material to be encapsulated. SUVs are prepared by extended sonication of MLVs to produce a homogeneous population of unilamellar liposomes. The material to be entrapped is added to a suspension of preformed MLVs and then sonicated. When using liposomes containing cationic lipids, the dried lipid film is resuspended in an appropriate solution such as sterile water or an isotonic buffer solution such as 10 mM Tris/NaCl, sonicated, and then the preformed liposomes are mixed directly with the DNA. The liposome and DNA form a very stable complex due to binding of the positively charged liposomes to the cationic DNA. SUVs find use with small nucleic acid fragments. LUVs are prepared by a number of methods, well known in the art. Commonly used methods include Ca2+-EDTA chelation (Papahadjopoulos et al., Biochim. Biophys. Acta, 394:483 (1975); Wilson et al., Cell , 17:77 (1979)); ether injection (Deamer et al., Biochim. Biophys. Acta, 443:629 (1976); Ostro et al., Biochem. Biophys. Res. Commun., 76:836 (1977); Fraley et al., Proc. Natl. Acad. Sci. USA, 76:3348 (1979)); detergent dialysis (Enoch et al., Proc. Natl. Acad. Sci. USA , 76:145 (1979)); and reverse-phase evaporation (REV) (Fraley et al., J. Biol. Chem., 255:10431 (1980); Szoka et al., Proc. Natl. Acad. Sci. USA , 75:145 (1978); Schaefer-Ridder et al., Science, 215:166 (1982)), which are herein incorporated by reference.

[0675] Generally, the ratio of DNA to liposomes will be from about 10:1 to about 1:10. Preferably, the ration will be from about 5:1 to about 1:5. More preferably, the ration will be about 3:1 to about 1:3. Still more preferably, the ratio will be about 1:1.

[0676] U.S. Pat. No.: 5,676,954 (which is herein incorporated by reference) reports on the injection of genetic material, complexed with cationic liposomes carriers, into mice. U.S. Pat. Nos. 4,897,355, 4,946,787, 5,049,386, 5,459,127, 5,589,466, 5,693,622, 5,580,859, 5,703,055, and international publication NO: WO 94/9469 (which are herein incorporated by reference) provide cationic lipids for use in transfecting DNA into cells and mammals. U.S. Pat. Nos. 5,589,466, 5,693,622, 5,580,859, 5,703,055, and international publication NO: WO 94/9469 (which are herein incorporated by reference) provide methods for delivering DNA-cationic lipid complexes to mammals.

[0677] In certain embodiments, cells are engineered, ex vivo or in vivo, using a retroviral particle containing RNA which comprises a sequence encoding polypeptides of the invention. Retroviruses from which the retroviral plasmid vectors may be derived include, but are not limited to, Moloney Murine Leukemia Virus, spleen necrosis virus, Rous sarcoma Virus, Harvey Sarcoma Virus, avian leukosis virus, gibbon ape leukemia virus, human immunodeficiency virus, Myeloproliferative Sarcoma Virus, and mammary tumor virus.

[0678] The retroviral plasmid vector is employed to transduce packaging cell lines to form producer cell lines. Examples of packaging cells which may be transfected include, but are not limited to, the PE501, PA317, R-2, R-AM, PA12, T19-14X, VT-19-17-H2, RCRE, RCRIP, GP+E-86, GP+envAm12, and DAN cell lines as described in Miller, Human Gene Therapy , 1:5-14 (1990), which is incorporated herein by reference in its entirety. The vector may transduce the packaging cells through any means known in the art. Such means include, but are not limited to, electroporation, the use of liposomes, and CaPO4 precipitation. In one alternative, the retroviral plasmid vector may be encapsulated into a liposome, or coupled to a lipid, and then administered to a host.

[0679] The producer cell line generates infectious retroviral vector particles which include polynucleotide encoding polypeptides of the invention. Such retroviral vector particles then may be employed, to transduce eukaryotic cells, either in vitro or in vivo. The transduced eukaryotic cells will express polypeptides of the invention.

[0680] In certain other embodiments, cells are engineered, ex vivo or in vivo, with polynucleotides of the invention contained in an adenovirus vector. Adenovirus can be manipulated such that it encodes and expresses polypeptides of the invention, and at the same time is inactivated in terms of its ability to replicate in a normal lytic viral life cycle. Adenovirus expression is achieved without integration of the viral DNA into the host cell chromosome, thereby alleviating concerns about insertional mutagenesis. Furthermore, adenoviruses have been used as live enteric vaccines for many years with an excellent safety profile (Schwartzet al., Am. Rev. Respir. Dis., 109:233-238 (1974)). Finally, adenovirus mediated gene transfer has been demonstrated in a number of instances including transfer of alpha-1-antitrypsin and CFTR to the lungs of cotton rats (Rosenfeld et al., Science, 252:431-434 (1991); Rosenfeld et al., Cell, 68:143-155 (1992)). Furthermore, extensive studies to attempt to establish adenovirus as a causative agent in human cancer were uniformly negative (Green et al. Proc. Natl. Acad. Sci. USA, 76:6606 (1979)).

[0681] Suitable adenoviral vectors useful in the present invention are described, for example, in Kozarsky and Wilson, Curr. Opin. Genet. Devel., 3:499-503 (1993); Rosenfeld et al., Cell, 68:143-155 (1992); Engelhardt et al., Human Genet. Ther., 4:759-769 (1993); Yang et al., Nature Genet., 7:362-369 (1994); Wilson et al., Nature, 365:691-692 (1993); and U.S. Pat. No.: 5,652,224, which are herein incorporated by reference. For example, the adenovirus vector Ad2 is useful and can be grown in human 293 cells. These cells contain the E1 region of adenovirus and constitutively express E1a and E1b, which complement the defective adenoviruses by providing the products of the genes deleted from the vector. In addition to Ad2, other varieties of adenovirus (e.g., Ad3, Ad5, and Ad7) are also useful in the present invention.

[0682] Preferably, the adenoviruses used in the present invention are replication deficient. Replication deficient adenoviruses require the aid of a helper virus and/or packaging cell line to form infectious particles. The resulting virus is capable of infecting cells and can express a polynucleotide of interest which is operably linked to a promoter, but cannot replicate in most cells. Replication deficient adenoviruses may be deleted in one or more of all or a portion of the following genes: E1a, E1b, E3, E4, E2a, or L1 through L5.

[0683] In certain other embodiments, the cells are engineered, ex vivo or in vivo, using an adeno-associated virus (AAV). AAVs are naturally occurring defective viruses that require helper viruses to produce infectious particles (Muzyczka, Curr. Topics in Microbiol. Immunol., 158:97 (1992)). It is also one of the few viruses that may integrate its DNA into non-dividing cells. Vectors containing as little as 300 base pairs of AAV can be packaged and can integrate, but space for exogenous DNA is limited to about 4.5 kb. Methods for producing and using such AAVs are known in the art. See, for example, U.S. Pat. Nos. 5,139,941, 5,173,414, 5,354,678, 5,436,146, 5,474,935, 5,478,745, and 5,589,377.

[0684] For example, an appropriate AAV vector for use in the present invention will include all the sequences necessary for DNA replication, encapsidation, and host-cell integration. The polynucleotide construct containing polynucleotides of the invention is inserted into the AAV vector using standard cloning methods, such as those found in Sambrook et al., Molecular Cloning: A Laboratory Manual, Cold Spring Harbor Press (1989). The recombinant AAV vector is then transfected into packaging cells which are infected with a helper virus, using any standard technique, including lipofection, electroporation, calcium phosphate precipitation, etc. Appropriate helper viruses include adenoviruses, cytomegaloviruses, vaccinia viruses, or herpes viruses. Once the packaging cells are transfected and infected, they will produce infectious AAV viral particles which contain the polynucleotide construct of the invention. These viral particles are then used to transduce eukaryotic cells, either ex vivo or in vivo. The transduced cells will contain the polynucleotide construct integrated into its genome, and will express the desired gene product.

[0685] Another method of gene therapy involves operably associating heterologous control regions and endogenous polynucleotide sequences (e.g. encoding the polypeptide sequence of interest) via homologous recombination (see, e.g., U.S. Pat. No.: 5,641,670, issued Jun. 24, 1997; International Publication NO: WO 96/29411, published Sep. 26, 1996; International Publication NO: WO 94/12650, published Aug. 4, 1994; Koller et al., Proc. Natl. Acad. Sci. USA, 86:8932-8935 (1989); and Zijlstra et al., Nature, 342:435-438 (1989). This method involves the activation of a gene which is present in the target cells, but which is not normally expressed in the cells, or is expressed at a lower level than desired.

[0686] Polynucleotide constructs are made, using standard techniques known in the art, which contain the promoter with targeting sequences flanking the promoter. Suitable promoters are described herein. The targeting sequence is sufficiently complementary to an endogenous sequence to permit homologous recombination of the promoter-targeting sequence with the endogenous sequence. The targeting sequence will be sufficiently near the 5′ end of the desired endogenous polynucleotide sequence so the promoter will be operably linked to the endogenous sequence upon homologous recombination.

[0687] The promoter and the targeting sequences can be amplified using PCR. Preferably, the amplified promoter contains distinct restriction enzyme sites on the 5′ and 3′ ends. Preferably, the 3′ end of the first targeting sequence contains the same restriction enzyme site as the 5′ end of the amplified promoter and the 5′ end of the second targeting sequence contains the same restriction site as the 3′ end of the amplified promoter. The amplified promoter and targeting sequences are digested and ligated together.

[0688] The promoter-targeting sequence construct is delivered to the cells, either as naked polynucleotide, or in conjunction with transfection-facilitating agents, such as liposomes, viral sequences, viral particles, whole viruses, lipofection, precipitating agents, etc., described in more detail above. The P promoter-targeting sequence can be delivered by any method, included direct needle injection, intravenous injection, topical administration, catheter infusion, particle accelerators, etc. The methods are described in more detail below.

[0689] The promoter-targeting sequence construct is taken up by cells. Homologous recombination between the construct and the endogenous sequence takes place, such that an endogenous sequence is placed under the control of the promoter. The promoter then drives the expression of the endogenous sequence.

[0690] The polynucleotides encoding polypeptides of the present invention may be administered along with other polynucleotides encoding angiogenic proteins. Angiogenic proteins include, but are not limited to, acidic and basic fibroblast growth factors, VEGF-1, VEGF-2 (VEGF-C), VEGF-3 (VEGF-B), epidermal growth factor alpha and beta, platelet-derived endothelial cell growth factor, platelet-derived growth factor, tumor necrosis factor alpha, hepatocyte growth factor, insulin like growth factor, colony stimulating factor, macrophage colony stimulating factor, granulocyte/macrophage colony stimulating factor, and nitric oxide synthase.

[0691] Preferably, the polynucleotide encoding a polypeptide of the invention contains a secretory signal sequence that facilitates secretion of the protein. Typically, the signal sequence is positioned in the coding region of the polynucleotide to be expressed towards or at the 5′ end of the coding region. The signal sequence may be homologous or heterologous to the polynucleotide of interest and may be homologous or heterologous to the cells to be transfected. Additionally, the signal sequence may be chemically synthesized using methods known in the art.

[0692] Any mode of administration of any of the above-described polynucleotides constructs can be used so long as the mode results in the expression of one or more molecules in an amount sufficient to provide a therapeutic effect. This includes direct needle injection, systemic injection, catheter infusion, biolistic injectors, particle accelerators (i.e., “gene guns”), gelfoam sponge depots, other commercially available depot materials, osmotic pumps (e.g., Alza minipumps), oral or suppositorial solid (tablet or pill) pharmaceutical formulations, and decanting or topical applications during surgery. For example, direct injection of naked calcium phosphate-precipitated plasmid into rat liver and rat spleen or a protein-coated plasmid into the portal vein has resulted in gene expression of the foreign gene in the rat livers. (Kaneda et al., Science, 243:375 (1989)).

[0693] A preferred method of local administration is by direct injection. Preferably, a recombinant molecule of the present invention complexed with a delivery vehicle is administered by direct injection into or locally within the area of arteries. Administration of a composition locally within the area of arteries refers to injecting the composition centimeters and preferably, millimeters within arteries.

[0694] Another method of local administration is to contact a polynucleotide construct of the present invention in or around a surgical wound. For example, a patient can undergo surgery and the polynucleotide construct can be coated on the surface of tissue inside the wound or the construct can be injected into areas of tissue inside the wound.

[0695] Therapeutic compositions useful in systemic administration, include recombinant molecules of the present invention complexed to a targeted delivery vehicle of the present invention. Suitable delivery vehicles for use with systemic administration comprise liposomes comprising ligands for targeting the vehicle to a particular site.

[0696] Preferred methods of systemic administration, include intravenous injection, aerosol, oral and percutaneous (topical) delivery. Intravenous injections can be performed using methods standard in the art. Aerosol delivery can also be performed using methods standard in the art (see, for example, Stribling et al., Proc. Natl. Acad. Sci. USA, 189:11277-11281 (1992), which is incorporated herein by reference). Oral delivery can be performed by complexing a polynucleotide construct of the present invention to a carrier capable of withstanding degradation by digestive enzymes in the gut of an animal. Examples of such carriers, include plastic capsules or tablets, such as those known in the art. Topical delivery can be performed by mixing a polynucleotide construct of the present invention with a lipophilic reagent (e.g., DMSO) that is capable of passing into the skin.

[0697] Determining an effective amount of substance to be delivered can depend upon a number of factors including, for example, the chemical structure and biological activity of the substance, the age and weight of the animal, the precise condition requiring treatment and its severity, and the route of administration. The frequency of treatments depends upon a number of factors, such as the amount of polynucleotide constructs administered per dose, as well as the health and history of the subject. The precise amount, number of doses, and timing of doses will be determined by the attending physician or veterinarian. Therapeutic compositions of the present invention can be administered to any animal, preferably to mammals and birds. Preferred mammals include humans, dogs, cats, mice, rats, rabbits sheep, cattle, horses and pigs, with humans being particularly preferred.

### Biological Activities

[0698] The polynucleotides or polypeptides, or agonists or antagonists of the present invention can be used in assays to test for one or more biological activities. If these polynucleotides and polypeptides do exhibit activity in a particular assay, it is likely that these molecules may be involved in the diseases associated with the biological activity. Thus, the polynucleotides or polypeptides, or agonists or antagonists could be used to treat the associated disease.

### Hyperproliferative Disorders

[0699] A polynucleotides or polypeptides, or agonists or antagonists of the invention can be used to treat, prevent, and/or diagnose hyperproliferative diseases, disorders, and/or conditions, including neoplasms. A polynucleotides or polypeptides, or agonists or antagonists of the present invention may inhibit the proliferation of the disorder through direct or indirect interactions. Alternatively, a polynucleotides or polypeptides, or agonists or antagonists of the present invention may proliferate other cells which can inhibit the hyperproliferative disorder.

[0700] For example, by increasing an immune response, particularly increasing antigenic qualities of the hyperproliferative disorder or by proliferating, differentiating, or mobilizing T-cells, hyperproliferative diseases, disorders, and/or conditions can be treated, prevented, and/or diagnosed. This immune response may be increased by either enhancing an existing immune response, or by initiating a new immune response. Alternatively, decreasing an immune response may also be a method of treating, preventing, and/or diagnosing hyperproliferative diseases, disorders, and/or conditions, such as a chemotherapeutic agent.

[0701] Examples of hyperproliferative diseases, disorders, and/or conditions that can be treated, prevented, and/or diagnosed by polynucleotides or polypeptides, or agonists or antagonists of the present invention include, but are not limited to neoplasms located in the: colon, abdomen, bone, breast, digestive system, liver, pancreas, peritoneum, endocrine glands (adrenal, parathyroid, pituitary, testicles, ovary, thymus, thyroid), eye, head and neck, nervous (central and peripheral), lymphatic system, pelvic, skin, soft tissue, spleen, thoracic, and urogenital.

[0702] Similarly, other hyperproliferative diseases, disorders, and/or conditions can also be treated, prevented, and/or diagnosed by a polynucleotides or polypeptides, or agonists or antagonists of the present invention. Examples of such hyperproliferative diseases, disorders, and/or conditions include, but are not limited to: hypergammaglobulinemia, lymphoproliferative diseases, disorders, and/or conditions, paraproteinemias, purpura, sarcoidosis, Sezary Syndrome, Waldenstron's Macroglobulinemia, Gaucher's Disease, histiocytosis, and any other hyperproliferative disease, besides neoplasia, located in an organ system listed above.

[0703] One preferred embodiment utilizes polynucleotides of the present invention to inhibit aberrant cellular division, by gene therapy using the present invention, and/or protein fusions or fragments thereof.

[0704] Thus, the present invention provides a method for treating or preventing cell proliferative diseases, disorders, and/or conditions by inserting into an abnormally proliferating cell a polynucleotide of the present invention, wherein said polynucleotide represses said expression.

[0705] Another embodiment of the present invention provides a method of treating or preventing cell-proliferative diseases, disorders, and/or conditions in individuals comprising administration of one or more active gene copies of the present invention to an abnormally proliferating cell or cells. In a preferred embodiment, polynucleotides of the present invention is a DNA construct comprising a recombinant expression vector effective in expressing a DNA sequence encoding said polynucleotides. In another preferred embodiment of the present invention, the DNA construct encoding the polynucleotides of the present invention is inserted into cells to be treated utilizing a retrovirus, or more Preferably an adenoviral vector (See G J. Nabel, et. al., PNAS 1999 96: 324-326, which is hereby incorporated by reference). In a most preferred embodiment, the viral vector is defective and will not transform non-proliferating cells, only proliferating cells. Moreover, in a preferred embodiment, the polynucleotides of the present invention inserted into proliferating cells either alone, or in combination with or fused to other polynucleotides, can then be modulated via an external stimulus (i.e. magnetic, specific small molecule, chemical, or drug administration, etc.), which acts upon the promoter upstream of said polynucleotides to induce expression of the encoded protein product. As such the beneficial therapeutic affect of the present invention may be expressly modulated (i.e. to increase, decrease, or inhibit expression of the present invention) based upon said external stimulus.

[0706] For local administration to abnormally proliferating cells, polynucleotides of the present invention may be administered by any method known to those of skill in the art including, but not limited to transfection, electroporation, microinjection of cells, or in vehicles such as liposomes, lipofectin, or as naked polynucleotides, or any other method described throughout the specification. The polynucleotide of the present invention may be delivered by known gene delivery systems such as, but not limited to, retroviral vectors (Gilboa, J. Virology 44:845 (1982); Hocke, Nature 320:275 (1986); Wilson, et al., Proc. Natl. Acad. Sci. U.S.A. 85:3014), vaccinia virus system (Chakrabarty et al., Mol. Cell Biol. 5:3403 (1985) or other efficient DNA delivery systems (Yates et al., Nature 313:812 (1985)) known to those skilled in the art. These references are exemplary only and are hereby incorporated by reference. In order to specifically deliver or transfect cells which are abnormally proliferating and spare non-dividing cells, it is preferable to utilize a retrovirus, or adenoviral (as described in the art and elsewhere herein) delivery system known to those of skill in the art. Since host DNA replication is required for retroviral DNA to integrate and the retrovirus will be unable to self replicate due to the lack of the retrovirus genes needed for its life cycle. Utilizing such a retroviral delivery system for polynucleotides of the present invention will target said gene and constructs to abnormally proliferating cells and will spare the non-dividing normal cells.

[0707] The polynucleotides of the present invention may be delivered directly to cell proliferative disorder/disease sites in internal organs, body cavities and the like by use of imaging devices used to guide an injecting needle directly to the disease site. The polynucleotides of the present invention may also be administered to disease sites at the time of surgical intervention.

[0708] By “cell proliferative disease” is meant any human or animal disease or disorder, affecting any one or any combination of organs, cavities, or body parts, which is characterized by single or multiple local abnormal proliferations of cells, groups of cells, or tissues, whether benign or malignant.

[0709] Any amount of the polynucleotides of the present invention may be administered as long as it has a biologically inhibiting effect on the proliferation of the treated cells. Moreover, it is possible to administer more than one of the polynucleotide of the present invention simultaneously to the same site. By “biologically inhibiting” is meant partial or total growth inhibition as well as decreases in the rate of proliferation or growth of the cells. The biologically inhibitory dose may be determined by assessing the effects of the polynucleotides of the present invention on target malignant or abnormally proliferating cell growth in tissue culture, tumor growth in animals and cell cultures, or any other method known to one of ordinary skill in the art.

[0710] The present invention is further directed to antibody-based therapies which involve administering of anti-polypeptides and anti-polynucleotide antibodies to a mammalian, preferably human, patient for treating, preventing, and/or diagnosing one or more of the described diseases, disorders, and/or conditions. Methods for producing anti-polypeptides and anti-polynucleotide antibodies polyclonal and monoclonal antibodies are described in detail elsewhere herein. Such antibodies may be provided in pharmaceutically acceptable compositions as known in the art or as described herein.

[0711] A summary of the ways in which the antibodies of the present invention may be used therapeutically includes binding polynucleotides or polypeptides of the present invention locally or systemically in the body or by direct cytotoxicity of the antibody, e.g. as mediated by complement (CDC) or by effector cells (ADCC). Some of these approaches are described in more detail below. Armed with the teachings provided herein, one of ordinary skill in the art will know how to use the antibodies of the present invention for diagnostic, monitoring or therapeutic purposes without undue experimentation.

[0712] In particular, the antibodies, fragments and derivatives of the present invention are useful for treating, preventing, and/or diagnosing a subject having or developing cell proliferative and/or differentiation diseases, disorders, and/or conditions as described herein. Such treatment comprises administering a single or multiple doses of the antibody, or a fragment, derivative, or a conjugate thereof.

[0713] The antibodies of this invention may be advantageously utilized in combination with other monoclonal or chimeric antibodies, or with lymphokines or hematopoietic growth factors, for example, which serve to increase the number or activity of effector cells which interact with the antibodies.

[0714] It is preferred to use high affinity and/or potent in vivo inhibiting and/or neutralizing antibodies against polypeptides or polynucleotides of the present invention, fragments or regions thereof, for both immunoassays directed to and therapy of diseases, disorders, and/or conditions related to polynucleotides or polypeptides, including fragments thereof, of the present invention. Such antibodies, fragments, or regions, will preferably have an affinity for polynucleotides or polypeptides, including fragments thereof. Preferred binding affinities include those with a dissociation constant or Kd less than 5×10-6M, 10-6M, 5×10-7M, 10-7M, 5×10-8M, 10-8M, 5×10-9M, 10-9M, 5×10-10M, 10-10M, 5×10-11M, 10-11M, 5×10-12M, 10-12M, 5×10-13M, 10-13M, 5×10-14M, 10-14M, 5×10-15M, and 10-15M.

[0715] Moreover, polypeptides of the present invention may be useful in inhibiting the angiogenesis of proliferative cells or tissues, either alone, as a protein fusion, or in combination with other polypeptides directly or indirectly, as described elsewhere herein. In a most preferred embodiment, said anti-angiogenesis effect may be achieved indirectly, for example, through the inhibition of hematopoietic, tumor-specific cells, such as tumor-associated macrophages (See Joseph 1IB, et al. J Natl Cancer Inst, 90(21):1648-53 (1998), which is hereby incorporated by reference). Antibodies directed to polypeptides or polynucleotides of the present invention may also result in inhibition of angiogenesis directly, or indirectly (See Witte L, et al., Cancer Metastasis Rev. 17(2):155-61 (1998), which is hereby incorporated by reference)).

### Cardiovascular Disorders

[0716] Polynucleotides or polypeptides, or agonists or antagonists of the invention may be used to treat, prevent, and/or diagnose cardiovascular diseases, disorders, and/or conditions, including peripheral artery disease, such as limb ischemia.

[0717] Cardiovascular diseases, disorders, and/or conditions include cardiovascular abnormalities, such as arterio-arterial fistula, arteriovenous fistula, cerebral arteriovenous malformations, congenital heart defects, pulmonary atresia, and Scimitar Syndrome. Congenital heart defects include aortic coarctation, cor triatriatum, coronary vessel anomalies, crisscross heart, dextrocardia, patent ductus arteriosus, Ebstein's anomaly, Eisenmenger complex, hypoplastic left heart syndrome, levocardia, tetralogy of fallot, transposition of great vessels, double outlet right ventricle, tricuspid atresia, persistent truncus arteriosus, and heart septal defects, such as aortopulmonary septal defect, endocardial cushion defects, Lutembacher's Syndrome, trilogy of Fallot, ventricular heart septal defects.

[0718] Cardiovascular diseases, disorders, and/or conditions also include heart disease, such as arrhythmias, carcinoid heart disease, high cardiac output, low cardiac output, cardiac tamponade, endocarditis (including bacterial), heart aneurysm, cardiac arrest, congestive heart failure, congestive cardiomyopathy, paroxysmal dyspnea, cardiac edema, heart hypertrophy, congestive cardiomyopathy, left ventricular hypertrophy, right ventricular hypertrophy, post-infarction heart rupture, ventricular septal rupture, heart valve diseases, myocardial diseases, myocardial ischemia, pericardial effusion, pericarditis (including constrictive and tuberculous), pneumopericardium, postpericardiotomy syndrome, pulmonary heart disease, rheumatic heart disease, ventricular dysfunction, hyperemia, cardiovascular pregnancy complications, Scimitar Syndrome, cardiovascular syphilis, and cardiovascular tuberculosis.

[0719] Arrhythmias include sinus arrhythmia, atrial fibrillation, atrial flutter, bradycardia, extrasystole, Adams-Stokes Syndrome, bundle-branch block, sinoatrial block, long QT syndrome, parasystole, Lown-Ganong-Levine Syndrome, Mahaim-type pre-excitation syndrome, Wolff-Parkinson-White syndrome, sick sinus syndrome, tachycardias, and ventricular fibrillation. Tachycardias include paroxysmal tachycardia, supraventricular tachycardia, accelerated idioventricular rhythm, atrioventricular nodal reentry tachycardia, ectopic atrial tachycardia, ectopic junctional tachycardia, sinoatrial nodal reentry tachycardia, sinus tachycardia, Torsades de Pointes, and ventricular tachycardia.

[0720] Heart valve disease include aortic valve insufficiency, aortic valve stenosis, hear murmurs, aortic valve prolapse, mitral valve prolapse, tricuspid valve prolapse, mitral valve insufficiency, mitral valve stenosis, pulmonary atresia, pulmonary valve insufficiency, pulmonary valve stenosis, tricuspid atresia, tricuspid valve insufficiency, and tricuspid valve stenosis.

[0721] Myocardial diseases include alcoholic cardiomyopathy, congestive cardiomyopathy, hypertrophic cardiomyopathy, aortic subvalvular stenosis, pulmonary subvalvular stenosis, restrictive cardiomyopathy, Chagas cardiomyopathy, endocardial fibroelastosis, endomyocardial fibrosis, Kearns Syndrome, myocardial reperfusion injury, and myocarditis.

[0722] Myocardial ischemias include coronary disease, such as angina pectoris, coronary aneurysm, coronary arteriosclerosis, coronary thrombosis, coronary vasospasm, myocardial infarction and myocardial stunning.

[0723] Cardiovascular diseases also include vascular diseases such as aneurysms, angiodysplasia, angiomatosis, bacillary angiomatosis, Hippel-Lindau Disease, Klippel-Trenaunay-Weber Syndrome, Sturge-Weber Syndrome, angioneurotic edema, aortic diseases, Takayasu's Arteritis, aortitis, Leriche's Syndrome, arterial occlusive diseases, arteritis, enarteritis, polyarteritis nodosa, cerebrovascular diseases, disorders, and/or conditions, diabetic angiopathies, diabetic retinopathy, embolisms, thrombosis, erythromelalgia, hemorrhoids, hepatic veno-occlusive disease, hypertension, hypotension, ischemia, peripheral vascular diseases, phlebitis, pulmonary veno-occlusive disease, Raynaud's disease, CREST syndrome, retinal vein occlusion, Scimitar syndrome, superior vena cava syndrome, telangiectasia, atacia telangiectasia, hereditary hemorrhagic telangiectasia, varicocele, varicose veins, varicose ulcer, vasculitis, and venous insufficiency.

[0724] Aneurysms include dissecting aneurysms, false aneurysms, infected aneurysms, ruptured aneurysms, aortic aneurysms, cerebral aneurysms, coronary aneurysms, heart aneurysms, and iliac aneurysms.

[0725] Arterial occlusive diseases include arteriosclerosis, intermittent claudication, carotid stenosis, fibromuscular dysplasias, mesenteric vascular occlusion, Moyamoya disease, renal artery obstruction, retinal artery occlusion, and thromboangiitis obliterans.

[0726] Cerebrovascular diseases, disorders, and/or conditions include carotid artery diseases, cerebral amyloid angiopathy, cerebral aneurysm, cerebral anoxia, cerebral arteriosclerosis, cerebral arteriovenous malformation, cerebral artery diseases, cerebral embolism and thrombosis, carotid artery thrombosis, sinus thrombosis, Wallenberg's syndrome, cerebral hemorrhage, epidural hematoma, subdural hematoma, subaraxhnoid hemorrhage, cerebral infarction, cerebral ischemia (including transient), subclavian steal syndrome, periventricular leukomalacia, vascular headache, cluster headache, migraine, and vertebrobasilar insufficiency.

[0727] Embolisms include air embolisms, amniotic fluid embolisms, cholesterol embolisms, blue toe syndrome, fat embolisms, pulmonary embolisms, and thromoboembolisms. Thrombosis include coronary thrombosis, hepatic vein thrombosis, retinal vein occlusion, carotid artery thrombosis, sinus thrombosis, Wallenberg's syndrome, and thrombophlebitis.

[0728] Ischemia includes cerebral ischemia, ischemic colitis, compartment syndromes, anterior compartment syndrome, myocardial ischemia, reperfusion injuries, and peripheral limb ischemia. Vasculitis includes aortitis, arteritis, Behcet's Syndrome, Churg-Strauss Syndrome, mucocutaneous lymph node syndrome, thromboangiitis obliterans, hypersensitivity vasculitis, Schoenlein-Henoch purpura, allergic cutaneous vasculitis, and Wegener's granulomatosis.

[0729] Polynucleotides or polypeptides, or agonists or antagonists of the invention, are especially effective for the treatment of critical limb ischemia and coronary disease.

[0730] Polypeptides may be administered using any method known in the art, including, but not limited to, direct needle injection at the delivery site, intravenous injection, topical administration, catheter infusion, biolistic injectors, particle accelerators, gelfoam sponge depots, other commercially available depot materials, osmotic pumps, oral or suppositorial solid pharmaceutical formulations, decanting or topical applications during surgery, aerosol delivery. Such methods are known in the art. Polypeptides of the invention may be administered as part of a Therapeutic, described in more detail below. Methods of delivering polynucleotides of the invention are described in more detail herein.

### Anti-Angiogenesis Activity

[0731] The naturally occurring balance between endogenous stimulators and inhibitors of angiogenesis is one in which inhibitory influences predominate. Rastinejad et al., Cell 56:345-355 (1989). In those rare instances in which neovascularization occurs under normal physiological conditions, such as wound healing, organ regeneration, embryonic development, and female reproductive processes, angiogenesis is stringently regulated and spatially and temporally delimited. Under conditions of pathological angiogenesis such as that characterizing solid tumor growth, these regulatory controls fail. Unregulated angiogenesis becomes pathologic and sustains progression of many neoplastic and non-neoplastic diseases. A number of serious diseases are dominated by abnormal neovascularization including solid tumor growth and metastases, arthritis, some types of eye diseases, disorders, and/or conditions, and psoriasis. See, e.g., reviews by Moses et al., Biotech. 9:630-634 (1991); Folkman et al., N. Engl. J. Med., 333:1757-1763 (1995); Auerbach et al., J. Microvasc. Res. 29:401-411 (1985); Folkman, Advances in Cancer Research, eds. Klein and Weinhouse, Academic Press, New York, pp. 175-203 (1985); Patz, Am. J. Opthalmol. 94:715-743 (1982); and Folkman et al., Science 221:719-725 (1983). In a number of pathological conditions, the process of angiogenesis contributes to the disease state. For example, significant data have accumulated which suggest that the growth of solid tumors is dependent on angiogenesis. Folkman and Klagsbrun, Science 235:442-447 (1987).

[0732] The present invention provides for treatment of diseases, disorders, and/or conditions associated with neovascularization by administration of the polynucleotides and/or polypeptides of the invention, as well as agonists or antagonists of the present invention. Malignant and metastatic conditions which can be treated with the polynucleotides and polypeptides, or agonists or antagonists of the invention include, but are not limited to, malignancies, solid tumors, and cancers described herein and otherwise known in the art (for a review of such disorders, see Fishman et al., Medicine, 2d Ed., J. B. Lippincott Co., Philadelphia (1985)).Thus, the present invention provides a method of treating, preventing, and/or diagnosing an angiogenesis-related disease and/or disorder, comprising administering to an individual in need thereof a therapeutically effective amount of a polynucleotide, polypeptide, antagonist and/or agonist of the invention. For example, polynucleotides, polypeptides, antagonists and/or agonists may be utilized in a variety of additional methods in order to therapeutically treat or prevent a cancer or tumor. Cancers which may be treated, prevented, and/or diagnosed with polynucleotides, polypeptides, antagonists and/or agonists include, but are not limited to solid tumors, including prostate, lung, breast, ovarian, stomach, pancreas, larynx, esophagus, testes, liver, parotid, biliary tract, colon, rectum, cervix, uterus, endometrium, kidney, bladder, thyroid cancer; primary tumors and metastases; melanomas; glioblastoma; Kaposi's sarcoma; leiomyosarcoma; non- small cell lung cancer; colorectal cancer; advanced malignancies; and blood born tumors such as leukemias. For example, polynucleotides, polypeptides, antagonists and/or agonists may be delivered topically, in order to treat or prevent cancers such as skin cancer, head and neck tumors, breast tumors, and Kaposi's sarcoma.

[0733] Within yet other aspects, polynucleotides, polypeptides, antagonists and/or agonists may be utilized to treat superficial forms of bladder cancer by, for example, intravesical administration. Polynucleotides, polypeptides, antagonists and/or agonists may be delivered directly into the tumor, or near the tumor site, via injection or a catheter. Of course, as the artisan of ordinary skill will appreciate, the appropriate mode of administration will vary according to the cancer to be treated. Other modes of delivery are discussed herein.

[0734] Polynucleotides, polypeptides, antagonists and/or agonists may be useful in treating, preventing, and/or diagnosing other diseases, disorders, and/or conditions, besides cancers, which involve angiogenesis. These diseases, disorders, and/or conditions include, but are not limited to: benign tumors, for example hemangiomas, acoustic neuromas, neurofibromas, trachomas, and pyogenic granulomas; artheroscleric plaques; ocular angiogenic diseases, for example, diabetic retinopathy, retinopathy of prematurity, macular degeneration, corneal graft rejection, neovascular glaucoma, retrolental fibroplasia, rubeosis, retinoblastoma, uvietis and Pterygia (abnormal blood vessel growth) of the eye; rheumatoid arthritis; psoriasis; delayed wound healing; endometriosis; vasculogenesis; granulations; hypertrophic scars (keloids); nonunion fractures; scleroderma; trachoma; vascular adhesions; myocardial angiogenesis; coronary collaterals; cerebral collaterals; arteriovenous malformations; ischemic limb angiogenesis; Osler-Webber Syndrome; plaque neovascularization; telangiectasia; hemophiliac joints; angiofibroma; fibromuscular dysplasia; wound granulation; Crohn's disease; and atherosclerosis.

[0735] For example, within one aspect of the present invention methods are provided for treating, preventing, and/or diagnosing hypertrophic scars and keloids, comprising the step of administering a polynucleotide, polypeptide, antagonist and/or agonist of the invention to a hypertrophic scar or keloid.

[0736] Within one embodiment of the present invention polynucleotides, polypeptides, antagonists and/or agonists are directly injected into a hypertrophic scar or keloid, in order to prevent the progression of these lesions. This therapy is of particular value in the prophylactic treatment of conditions which are known to result in the development of hypertrophic scars and keloids (e.g., burns), and is preferably initiated after the proliferative phase has had time to progress (approximately 14 days after the initial injury), but before hypertrophic scar or keloid development. As noted above, the present invention also provides methods for treating, preventing, and/or diagnosing neovascular diseases of the eye, including for example, corneal neovascularization, neovascular glaucoma, proliferative diabetic retinopathy, retrolental fibroplasia and macular degeneration.

[0737] Moreover, Ocular diseases, disorders, and/or conditions associated with neovascularization which can be treated, prevented, and/or diagnosed with the polynucleotides and polypeptides of the present invention (including agonists and/or antagonists) include, but are not limited to: neovascular glaucoma, diabetic retinopathy, retinoblastoma, retrolental fibroplasia, uveitis, retinopathy of prematurity macular degeneration, corneal graft neovascularization, as well as other eye inflammatory diseases, ocular tumors and diseases associated with choroidal or iris neovascularization. See, e.g., reviews by Waltman et al., Am. J. Ophthal. 85:704-710 (1978) and Gartner et al., Surv. Ophthal. 22:291-312 (1978).

[0738] Thus, within one aspect of the present invention methods are provided for treating or preventing neovascular diseases of the eye such as corneal neovascularization (including corneal graft neovascularization), comprising the step of administering to a patient a therapeutically effective amount of a compound (as described above) to the cornea, such that the formation of blood vessels is inhibited. Briefly, the cornea is a tissue which normally lacks blood vessels. In certain pathological conditions however, capillaries may extend into the cornea from the pericorneal vascular plexus of the limbus. When the cornea becomes vascularized, it also becomes clouded, resulting in a decline in the patient's visual acuity. Visual loss may become complete if the cornea completely opacitates. A wide variety of diseases, disorders, and/or conditions can result in corneal neovascularization, including for example, corneal infections (e.g., trachoma, herpes simplex keratitis, leishmaniasis and onchocerciasis), immunological processes (e.g., graft rejection and Stevens-Johnson's syndrome), alkali burns, trauma, inflammation (of any cause), toxic and nutritional deficiency states, and as a complication of wearing contact lenses.

[0739] Within particularly preferred embodiments of the invention, may be prepared for topical administration in saline (combined with any of the preservatives and antimicrobial agents commonly used in ocular preparations), and administered in eyedrop form. The solution or suspension may be prepared in its pure form and administered several times daily. Alternatively, anti-angiogenic compositions, prepared as described above, may also be administered directly to the cornea. Within preferred embodiments, the anti-angiogenic composition is prepared with a muco-adhesive polymer which binds to cornea. Within further embodiments, the anti-angiogenic factors or anti-angiogenic compositions may be utilized as an adjunct to conventional steroid therapy. Topical therapy may also be useful prophylactically in corneal lesions which are known to have a high probability of inducing an angiogenic response (such as chemical burns). In these instances the treatment, likely in combination with steroids, may be instituted immediately to help prevent subsequent complications.

[0740] Within other embodiments, the compounds described above may be injected directly into the corneal stroma by an ophthalmologist under microscopic guidance. The preferred site of injection may vary with the morphology of the individual lesion, but the goal of the administration would be to place the composition at the advancing front of the vasculature (i.e., interspersed between the blood vessels and the normal cornea). In most cases this would involve perilimbic corneal injection to “protect” the cornea from the advancing blood vessels. This method may also be utilized shortly after a corneal insult in order to prophylactically prevent corneal neovascularization. In this situation the material could be injected in the perilimbic cornea interspersed between the corneal lesion and its undesired potential limbic blood supply. Such methods may also be utilized in a similar fashion to prevent capillary invasion of transplanted corneas. In a sustained-release form injections might only be required 2-3 times per year. A steroid could also be added to the injection solution to reduce inflammation resulting from the injection itself.

[0741] Within another aspect of the present invention, methods are provided for treating or preventing neovascular glaucoma, comprising the step of administering to a patient a therapeutically effective amount of a polynucleotide, polypeptide, antagonist and/or agonist to the eye, such that the formation of blood vessels is inhibited. In one embodiment, the compound may be administered topically to the eye in order to treat or prevent early forms of neovascular glaucoma. Within other embodiments, the compound may be implanted by injection into the region of the anterior chamber angle. Within other embodiments, the compound may also be placed in any location such that the compound is continuously released into the aqueous humor. Within another aspect of the present invention, methods are provided for treating or preventing proliferative diabetic retinopathy, comprising the step of administering to a patient a therapeutically effective amount of a polynucleotide, polypeptide, antagonist and/or agonist to the eyes, such that the formation of blood vessels is inhibited.

[0742] Within particularly preferred embodiments of the invention, proliferative diabetic retinopathy may be treated by injection into the aqueous humor or the vitreous, in order to increase the local concentration of the polynucleotide, polypeptide, antagonist and/or agonist in the retina. Preferably, this treatment should be initiated prior to the acquisition of severe disease requiring photocoagulation.

[0743] Within another aspect of the present invention, methods are provided for treating or preventing retrolental fibroplasia, comprising the step of administering to a patient a therapeutically effective amount of a polynucleotide, polypeptide, antagonist and/or agonist to the eye, such that the formation of blood vessels is inhibited. The compound may be administered topically, via intravitreous injection and/or via intraocular implants.

[0744] Additionally, diseases, disorders, and/or conditions which can be treated, prevented, and/or diagnosed with the polynucleotides, polypeptides, agonists and/or agonists include, but are not limited to, hemangioma, arthritis, psoriasis, angiofibroma, atherosclerotic plaques, delayed wound healing, granulations, hemophilic joints, hypertrophic scars, nonunion fractures, Osler-Weber syndrome, pyogenic granuloma, scleroderma, trachoma, and vascular adhesions.

[0745] Moreover, diseases, disorders, and/or conditions and/or states, which can be treated, prevented, and/or diagnosed with the polynucleotides, polypeptides, agonists and/or agonists include, but are not limited to, solid tumors, blood born tumors such as leukemias, tumor metastasis, Kaposi's sarcoma, benign tumors, for example hemangiomas, acoustic neuromas, neurofibromas, trachomas, and pyogenic granulomas, rheumatoid arthritis, psoriasis, ocular angiogenic diseases, for example, diabetic retinopathy, retinopathy of prematurity, macular degeneration, corneal graft rejection, neovascular glaucoma, retrolental fibroplasia, rubeosis, retinoblastoma, and uvietis, delayed wound healing, endometriosis, vascluogenesis, granulations, hypertrophic scars (keloids), nonunion fractures, scleroderma, trachoma, vascular adhesions, myocardial angiogenesis, coronary collaterals, cerebral collaterals, arteriovenous malformations, ischemic limb angiogenesis, Osler-Webber Syndrome, plaque neovascularization, telangiectasia, hemophiliac joints, angiofibroma fibromuscular dysplasia, wound granulation, Crohn's disease, atherosclerosis, birth control agent by preventing vascularization required for embryo implantation controlling menstruation, diseases that have angiogenesis as a pathologic consequence such as cat scratch disease (Rochele minalia quintosa), ulcers (Helicobacter pylori), Bartonellosis and bacillary angiomatosis.

[0746] In one aspect of the birth control method, an amount of the compound sufficient to block embryo implantation is administered before or after intercourse and fertilization have occurred, thus providing an effective method of birth control, possibly a “morning after” method. Polynucleotides, polypeptides, agonists and/or agonists may also be used in controlling menstruation or administered as either a peritoneal lavage fluid or for peritoneal implantation in the treatment of endometriosis.

[0747] Polynucleotides, polypeptides, agonists and/or agonists of the present invention may be incorporated into surgical sutures in order to prevent stitch granulomas.

[0748] Polynucleotides, polypeptides, agonists and/or agonists may be utilized in a wide variety of surgical procedures. For example, within one aspect of the present invention a compositions (in the form of, for example, a spray or film) may be utilized to coat or spray an area prior to removal of a tumor, in order to isolate normal surrounding tissues from malignant tissue, and/or to prevent the spread of disease to surrounding tissues. Within other aspects of the present invention, compositions (e.g., in the form of a spray) may be delivered via endoscopic procedures in order to coat tumors, or inhibit angiogenesis in a desired locale. Within yet other aspects of the present invention, surgical meshes which have been coated with anti- angiogenic compositions of the present invention may be utilized in any procedure wherein a surgical mesh might be utilized. For example, within one embodiment of the invention a surgical mesh laden with an anti-angiogenic composition may be utilized during abdominal cancer resection surgery (e.g., subsequent to colon resection) in order to provide support to the structure, and to release an amount of the anti-angiogenic factor.

[0749] Within further aspects of the present invention, methods are provided for treating tumor excision sites, comprising administering a polynucleotide, polypeptide, agonist and/or agonist to the resection margins of a tumor subsequent to excision, such that the local recurrence of cancer and the formation of new blood vessels at the site is inhibited. Within one embodiment of the invention, the anti-angiogenic compound is administered directly to the tumor excision site (e.g., applied by swabbing, brushing or otherwise coating the resection margins of the tumor with the anti-angiogenic compound). Alternatively, the anti-angiogenic compounds may be incorporated into known surgical pastes prior to administration. Within particularly preferred embodiments of the invention, the anti-angiogenic compounds are applied after hepatic resections for malignancy, and after neurosurgical operations.

[0750] Within one aspect of the present invention, polynucleotides, polypeptides, agonists and/or agonists may be administered to the resection margin of a wide variety of tumors, including for example, breast, colon, brain and hepatic tumors. For example, within one embodiment of the invention, anti-angiogenic compounds may be administered to the site of a neurological tumor subsequent to excision, such that the formation of new blood vessels at the site are inhibited.

[0751] The polynucleotides, polypeptides, agonists and/or agonists of the present invention may also be administered along with other anti-angiogenic factors. Representative examples of other anti-angiogenic factors include: Anti-Invasive Factor, retinoic acid and derivatives thereof, paclitaxel, Suramin, Tissue Inhibitor of Metalloproteinase-1, Tissue Inhibitor of Metalloproteinase-2, Plasminogen Activator Inhibitor-1, Plasminogen Activator Inhibitor-2, and various forms of the lighter “d group” transition metals.

[0752] Lighter “d group” transition metals include, for example, vanadium, molybdenum, tungsten, titanium, niobium, and tantalum species. Such transition metal species may form transition metal complexes. Suitable complexes of the above-mentioned transition metal species include oxo transition metal complexes.

[0753] Representative examples of vanadium complexes include oxo vanadium complexes such as vanadate and vanadyl complexes. Suitable vanadate complexes include metavanadate and orthovanadate complexes such as, for example, ammonium metavanadate, sodium metavanadate, and sodium orthovanadate. Suitable vanadyl complexes include, for example, vanadyl acetylacetonate and vanadyl sulfate including vanadyl sulfate hydrates such as vanadyl sulfate mono- and trihydrates.

[0754] Representative examples of tungsten and molybdenum complexes also include oxo complexes. Suitable oxo tungsten complexes include tungstate and tungsten oxide complexes. Suitable tungstate complexes include ammonium tungstate, calcium tungstate, sodium tungstate dihydrate, and tungstic acid. Suitable tungsten oxides include tungsten (IV) oxide and tungsten (VI) oxide. Suitable oxo molybdenum complexes include molybdate, molybdenum oxide, and molybdenyl complexes. Suitable molybdate complexes include ammonium molybdate and its hydrates, sodium molybdate and its hydrates, and potassium molybdate and its hydrates. Suitable molybdenum oxides include molybdenum (VI) oxide, molybdenum (VI) oxide, and molybdic acid. Suitable molybdenyl complexes include, for example, molybdenyl acetylacetonate. Other suitable tungsten and molybdenum complexes include hydroxo derivatives derived from, for example, glycerol, tartaric acid, and sugars.

[0755] A wide variety of other anti-angiogenic factors may also be utilized within the context of the present invention. Representative examples include platelet factor 4; protamine sulphate; sulphated chitin derivatives (prepared from queen crab shells), (Murata et al., Cancer Res. 51:22-26, 1991); Sulphated Polysaccharide Peptidoglycan Complex (SP- PG) (the function of this compound may be enhanced by the presence of steroids such as estrogen, and tamoxifen citrate); Staurosporine; modulators of matrix metabolism, including for example, proline analogs, cishydroxyproline, d,L-3,4-dehydroproline, Thiaproline, alpha,alpha-dipyridyl, aminopropionitrile fumarate; ⁴-propyl-5-(4-pyridinyl)-2(3H)-oxazolone; Methotrexate; Mitoxantrone; Heparin; Interferons; 2 Macroglobulin-serum; ChIMP-3 (Pavloff et al., J. Bio. Chem. 267:17321-17326, 1992); Chymostatin (Tomkinson et al., Biochem J. 286:475-480, 1992); Cyclodextrin Tetradecasulfate; Eponemycin; Camptothecin; Fumagillin (Ingber et al., Nature 348:555-557, 1990); Gold Sodium Thiomalate (“GST”; Matsubara and Ziff, J. Clin. Invest. 79:1440-1446, 1987); anticollagenase-serum; alpha2-antiplasmin (Holmes et al., J. Biol. Chem. 262(4):1659-1664, 1987); Bisantrene (National Cancer Institute); Lobenzarit disodium (N-(2)-carboxyphenyl-4-chloroanthronilic acid disodium or “CCA”; Takeuchi et al., Agents Actions 36:312-316, 1992); Thalidomide; Angostatic steroid; AGM-1470; carboxynaminolmidazole; and metalloproteinase inhibitors such as BB94.

### Diseases at the Cellular Level

[0756] Diseases associated with increased cell survival or the inhibition of apoptosis that could be treated, prevented, and/or diagnosed by the polynucleotides or polypeptides and/or antagonists or agonists of the invention, include cancers (such as follicular lymphomas, carcinomas with p53 mutations, and hormone-dependent tumors, including, but not limited to colon cancer, cardiac tumors, pancreatic cancer, melanoma, retinoblastoma, glioblastoma, lung cancer, intestinal cancer, testicular cancer, stomach cancer, neuroblastoma, myxoma, myoma, lymphoma, endothelioma, osteoblastoma, osteoclastoma, osteosarcoma, chondrosarcoma, adenoma, breast cancer, prostate cancer, Kaposi's sarcoma and ovarian cancer); autoimmune diseases, disorders, and/or conditions (such as, multiple sclerosis, Sjogren's syndrome, Hashimoto's thyroiditis, biliary cirrhosis, Behcet's disease, Crohn's disease, polymyositis, systemic lupus erythematosus and immune-related glomerulonephritis and rheumatoid arthritis) and viral infections (such as herpes viruses, pox viruses and adenoviruses), inflammation, graft v. host disease, acute graft rejection, and chronic graft rejection. In preferred embodiments, the polynucleotides or polypeptides, and/or agonists or antagonists of the invention are used to inhibit growth, progression, and/or metastasis of cancers, in particular those listed above.

[0757] Additional diseases or conditions associated with increased cell survival that could be treated, prevented or diagnosed by the polynucleotides or polypeptides, or agonists or antagonists of the invention, include, but are not limited to, progression, and/or metastases of malignancies and related disorders such as leukemia (including acute leukemias (e.g., acute lymphocytic leukemia, acute myelocytic leukemia (including myeloblastic, promyelocytic, myelomonocytic, monocytic, and erythroleukemia)) and chronic leukemias (e.g., chronic myelocytic (granulocytic) leukemia and chronic lymphocytic leukemia)), polycythemia vera, lymphomas (e.g., Hodgkin's disease and non-Hodgkin's disease), multiple myeloma, Waldenstrom's macroglobulinemia, heavy chain disease, and solid tumors including, but not limited to, sarcomas and carcinomas such as fibrosarcoma, myxosarcoma, liposarcoma, chondrosarcoma, osteogenic sarcoma, chordoma, angiosarcoma, endotheliosarcoma, lymphangiosarcoma, lymphangioendotheliosarcoma, synovioma, mesothelioma, Ewing's tumor, leiomyosarcoma, rhabdomyosarcoma, colon carcinoma, pancreatic cancer, breast cancer, ovarian cancer, prostate cancer, squamous cell carcinoma, basal cell carcinoma, adenocarcinoma, sweat gland carcinoma, sebaceous gland carcinoma, papillary carcinoma, papillary adenocarcinomas, cystadenocarcinoma, medullary carcinoma, bronchogenic carcinoma, renal cell carcinoma, hepatoma, bile duct carcinoma, choriocarcinoma, seminoma, embryonal carcinoma, Wilm's tumor, cervical cancer, testicular tumor, lung carcinoma, small cell lung carcinoma, bladder carcinoma, epithelial carcinoma, glioma, astrocytoma, medulloblastoma, craniopharyngioma, ependymoma, pinealoma, hemangioblastoma, acoustic neuroma, oligodendroglioma, menangioma, melanoma, neuroblastoma, and retinoblastoma.

[0758] Diseases associated with increased apoptosis that could be treated, prevented, and/or diagnosed by the polynucleotides or polypeptides, and/or agonists or antagonists of the invention, include AIDS; neurodegenerative diseases, disorders, and/or conditions (such as Alzheimer's disease, Parkinson's disease, Amyotrophic lateral sclerosis, Retinitis pigmentosa, Cerebellar degeneration and brain tumor or prior associated disease); autoimmune diseases, disorders, and/or conditions (such as, multiple sclerosis, Sjogren's syndrome, Hashimoto's thyroiditis, biliary cirrhosis, Behcet's disease, Crohn's disease, polymyositis, systemic lupus erythematosus and immune-related glomerulonephritis and rheumatoid arthritis) myelodysplastic syndromes (such as aplastic anemia), graft v. host disease, ischemic injury (such as that caused by myocardial infarction, stroke and reperfusion injury), liver injury (e.g., hepatitis related liver injury, ischemia/reperfusion injury, cholestosis (bile duct injury) and liver cancer); toxin-induced liver disease (such as that caused by alcohol), septic shock, cachexia and anorexia.

### Wound Healing and Epithelial Cell Proliferation

[0759] In accordance with yet a further aspect of the present invention, there is provided a process for utilizing the polynucleotides or polypeptides, and/or agonists or antagonists of the invention, for therapeutic purposes, for example, to stimulate epithelial cell proliferation and basal keratinocytes for the purpose of wound healing, and to stimulate hair follicle production and healing of dermal wounds. Polynucleotides or polypeptides, as well as agonists or antagonists of the invention, may be clinically useful in stimulating wound healing including surgical wounds, excisional wounds, deep wounds involving damage of the dermis and epidermis, eye tissue wounds, dental tissue wounds, oral cavity wounds, diabetic ulcers, dermal ulcers, cubitus ulcers, arterial ulcers, venous stasis ulcers, burns resulting from heat exposure or chemicals, and other abnormal wound healing conditions such as uremia, malnutrition, vitamin deficiencies and complications associated with systemic treatment with steroids, radiation therapy and antineoplastic drugs and antimetabolites. Polynucleotides or polypeptides, and/or agonists or antagonists of the invention, could be used to promote dermal reestablishment subsequent to dermal loss

[0760] The polynucleotides or polypeptides, and/or agonists or antagonists of the invention, could be used to increase the adherence of skin grafts to a wound bed and to stimulate re-epithelialization from the wound bed. The following are a non-exhaustive list of grafts that polynucleotides or polypeptides, agonists or antagonists of the invention, could be used to increase adherence to a wound bed: autografts, artificial skin, allografts, autodermic graft, autoepidermic grafts, avacular grafts, Blair-Brown grafts, bone graft, brephoplastic grafts, cutis graft, delayed graft, dermic graft, epidermic graft, fascia graft, full thickness graft, heterologous graft, xenograft, homologous graft, hyperplastic graft, lamellar graft, mesh graft, mucosal graft, Ollier-Thiersch graft, omenpal graft, patch graft, pedicle graft, penetrating graft, split skin graft, thick split graft. The polynucleotides or polypeptides, and/or agonists or antagonists of the invention, can be used to promote skin strength and to improve the appearance of aged skin.

[0761] It is believed that the polynucleotides or polypeptides, and/or agonists or antagonists of the invention, will also produce changes in hepatocyte proliferation, and epithelial cell proliferation in the lung, breast, pancreas, stomach, small intestine, and large intestine. The polynucleotides or polypeptides, and/or agonists or antagonists of the invention, could promote proliferation of epithelial cells such as sebocytes, hair follicles, hepatocytes, type II pneumocytes, mucin-producing goblet cells, and other epithelial cells and their progenitors contained within the skin, lung, liver, and gastrointestinal tract. The polynucleotides or polypeptides, and/or agonists or antagonists of the invention, may promote proliferation of endothelial cells, keratinocytes, and basal keratinocytes.

[0762] The polynucleotides or polypeptides, and/or agonists or antagonists of the invention, could also be used to reduce the side effects of gut toxicity that result from radiation, chemotherapy treatments or viral infections. The polynucleotides or polypeptides, and/or agonists or antagonists of the invention, may have a cytoprotective effect on the small intestine mucosa. The polynucleotides or polypeptides, and/or agonists or antagonists of the invention, may also stimulate healing of mucositis (mouth ulcers) that result from chemotherapy and viral infections.

[0763] The polynucleotides or polypeptides, and/or agonists or antagonists of the invention, could further be used in full regeneration of skin in full and partial thickness skin defects, including burns, (i.e., repopulation of hair follicles, sweat glands, and sebaceous glands), treatment of other skin defects such as psoriasis. The polynucleotides or polypeptides, and/or agonists or antagonists of the invention, could be used to treat epidermolysis bullosa, a defect in adherence of the epidermis to the underlying dermis which results in frequent, open and painful blisters by accelerating reepithelialization of these lesions. The polynucleotides or polypeptides, and/or agonists or antagonists of the invention, could also be used to treat gastric and doudenal ulcers and help heal by scar formation of the mucosal lining and regeneration of glandular mucosa and duodenal mucosal lining more rapidly. Inflamamatory bowel diseases, such as Crohn's disease and ulcerative colitis, are diseases which result in destruction of the mucosal surface of the small or large intestine, respectively. Thus, the polynucleotides or polypeptides, and/or agonists or antagonists of the invention, could be used to promote the resurfacing of the mucosal surface to aid more rapid healing and to prevent progression of inflammatory bowel disease. Treatment with the polynucleotides or polypeptides, and/or agonists or antagonists of the invention, is expected to have a significant effect on the production of mucus throughout the gastrointestinal tract and could be used to protect the intestinal mucosa from injurious substances that are ingested or following surgery. The polynucleotides or polypeptides, and/or agonists or antagonists of the invention, could be used to treat diseases associate with the under expression of the polynucleotides of the invention.

[0764] Moreover, the polynucleotides or polypeptides, and/or agonists or antagonists of the invention, could be used to prevent and heal damage to the lungs due to various pathological states. A growth factor such as the polynucleotides or polypeptides, and/or agonists or antagonists of the invention, which could stimulate proliferation and differentiation and promote the repair of alveoli and brochiolar epithelium to prevent or treat acute or chronic lung damage. For example, emphysema, which results in the progressive loss of aveoli, and inhalation injuries, i.e., resulting from smoke inhalation and burns, that cause necrosis of the bronchiolar epithelium and alveoli could be effectively treated, prevented, and/or diagnosed using the polynucleotides or polypeptides, and/or agonists or antagonists of the invention. Also, the polynucleotides or polypeptides, and/or agonists or antagonists of the invention, could be used to stimulate the proliferation of and differentiation of type II pneumocytes, which may help treat or prevent disease such as hyaline membrane diseases, such as infant respiratory distress syndrome and bronchopulmonary displasia, in premature infants.

[0765] The polynucleotides or polypeptides, and/or agonists or antagonists of the invention, could stimulate the proliferation and differentiation of hepatocytes and, thus, could be used to alleviate or treat liver diseases and pathologies such as fulminant liver failure caused by cirrhosis, liver damage caused by viral hepatitis and toxic substances (i.e., acetaminophen, carbon tetraholoride and other hepatotoxins known in the art).

[0766] In addition, the polynucleotides or polypeptides, and/or agonists or antagonists of the invention, could be used treat or prevent the onset of diabetes mellitus. In patients with newly diagnosed Types I and II diabetes, where some islet cell function remains, the polynucleotides or polypeptides, and/or agonists or antagonists of the invention, could be used to maintain the islet function so as to alleviate, delay or prevent permanent manifestation of the disease. Also, the polynucleotides or polypeptides, and/or agonists or antagonists of the invention, could be used as an auxiliary in islet cell transplantation to improve or promote islet cell function.

### Neurological Diseases

[0767] Nervous system diseases, disorders, and/or conditions, which can be treated, prevented, and/or diagnosed with the compositions of the invention (e.g., polypeptides, polynucleotides, and/or agonists or antagonists), include, but are not limited to, nervous system injuries, and diseases, disorders, and/or conditions which result in either a disconnection of axons, a diminution or degeneration of neurons, or demyelination. Nervous system lesions which may be treated, prevented, and/or diagnosed in a patient (including human and non-human mammalian patients) according to the invention, include but are not limited to, the following lesions of either the central (including spinal cord, brain) or peripheral nervous systems: (1) ischemic lesions, in which a lack of oxygen in a portion of the nervous system results in neuronal injury or death, including cerebral infarction or ischemia, or spinal cord infarction or ischemia; (2) traumatic lesions, including lesions caused by physical injury or associated with surgery, for example, lesions which sever a portion of the nervous system, or compression injuries; (3) malignant lesions, in which a portion of the nervous system is destroyed or injured by malignant tissue which is either a nervous system associated malignancy or a malignancy derived from non-nervous system tissue; (4) infectious lesions, in which a portion of the nervous system is destroyed or injured as a result of infection, for example, by an abscess or associated with infection by human immunodeficiency virus, herpes zoster, or herpes simplex virus or with Lyme disease, tuberculosis, syphilis; (5) degenerative lesions, in which a portion of the nervous system is destroyed or injured as a result of a degenerative process including but not limited to degeneration associated with Parkinson's disease, Alzheimer's disease, Huntington's chorea, or amyotrophic lateral sclerosis (ALS); (6) lesions associated with nutritional diseases, disorders, and/or conditions, in which a portion of the nervous system is destroyed or injured by a nutritional disorder or disorder of metabolism including but not limited to, vitamin B12 deficiency, folic acid deficiency, Wernicke disease, tobacco-alcohol amblyopia, Marchiafava-Bignami disease (primary degeneration of the corpus callosum), and alcoholic cerebellar degeneration; (7) neurological lesions associated with systemic diseases including, but not limited to, diabetes (diabetic neuropathy, Bell's palsy), systemic lupus erythematosus, carcinoma, or sarcoidosis; (8) lesions caused by toxic substances including alcohol, lead, or particular neurotoxins; and (9) demyelinated lesions in which a portion of the nervous system is destroyed or injured by a demyelinating disease including, but not limited to, multiple sclerosis, human immunodeficiency virus-associated myelopathy, transverse myelopathy or various etiologies, progressive multifocal leukoencephalopathy, and central pontine myelinolysis.

[0768] In a preferred embodiment, the polypeptides, polynucleotides, or agonists or antagonists of the invention are used to protect neural cells from the damaging effects of cerebral hypoxia. According to this embodiment, the′ compositions of the invention are used to treat, prevent, and/or diagnose neural cell injury associated with cerebral hypoxia. In one aspect of this embodiment, the polypeptides, polynucleotides, or agonists or antagonists of the invention are used to treat, prevent, and/or diagnose neural cell injury associated with cerebral ischemia. In another aspect of this embodiment, the polypeptides, polynucleotides, or agonists or antagonists of the invention are used to treat, prevent, and/or diagnose neural cell injury associated with cerebral infarction. In another aspect of this embodiment, the polypeptides, polynucleotides, or agonists or antagonists of the invention are used to treat, prevent, and/or diagnose or prevent neural cell injury associated with a stroke. In a further aspect of this embodiment, the polypeptides, polynucleotides, or agonists or antagonists of the invention are used to treat, prevent, and/or diagnose neural cell injury associated with a heart attack.

[0769] The compositions of the invention which are useful for treating or preventing a nervous system disorder may be selected by testing for biological activity in promoting the survival or differentiation of neurons. For example, and not by way of limitation, compositions of the invention which elicit any of the following effects may be useful according to the invention: (1) increased survival time of neurons in culture; (2) increased sprouting of neurons in culture or in vivo; (3) increased production of a neuron-associated molecule in culture or in vivo, e.g., choline acetyltransferase or acetylcholinesterase with respect to motor neurons; or (4) decreased symptoms of neuron dysfunction in vivo. Such effects may be measured by any method known in the art. In preferred, non-limiting embodiments, increased survival of neurons may routinely be measured using a method set forth herein or otherwise known in the art, such as, for example, the method set forth in Arakawa et al. (J. Neurosci. 10:3507-3515 (1990)); increased sprouting of neurons may be detected by methods known in the art, such as, for example, the methods set forth in Pestronk et al. (Exp. Neurol. 70:65-82 (1980)) or Brown et al. (Ann. Rev. Neurosci. 4:17-42 (1981)); increased production of neuron-associated molecules may be measured by bioassay, enzymatic assay, antibody binding, Northern blot assay, etc., using techniques known in the art and depending on the molecule to be measured; and motor neuron dysfunction may be measured by assessing the physical manifestation of motor neuron disorder, e.g., weakness, motor neuron conduction velocity, or functional disability.

[0770] In specific embodiments, motor neuron diseases, disorders, and/or conditions that may be treated, prevented, and/or diagnosed according to the invention include, but are not limited to, diseases, disorders, and/or conditions such as infarction, infection, exposure to toxin, trauma, surgical damage, degenerative disease or malignancy that may affect motor neurons as well as other components of the nervous system, as well as diseases, disorders, and/or conditions that selectively affect neurons such as amyotrophic lateral sclerosis, and including, but not limited to, progressive spinal muscular atrophy, progressive bulbar palsy, primary lateral sclerosis, infantile and juvenile muscular atrophy, progressive bulbar paralysis of childhood (Fazio-Londe syndrome), poliomyelitis and the post polio syndrome, and Hereditary Motorsensory Neuropathy (Charcot-Marie-Tooth Disease).

### Infectious Disease

[0771] A polypeptide or polynucleotide and/or agonist or antagonist of the present invention can be used to treat, prevent, and/or diagnose infectious agents. For example, by increasing the immune response, particularly increasing the proliferation and differentiation of B and/or T cells, infectious diseases may be treated, prevented, and/or diagnosed. The immune response may be increased by either enhancing an existing immune response, or by initiating a new immune response. Alternatively, polypeptide or polynucleotide and/or agonist or antagonist of the present invention may also directly inhibit the infectious agent, without necessarily eliciting an immune response.

[0772] Viruses are one example of an infectious agent that can cause disease or symptoms that can be treated, prevented, and/or diagnosed by a polynucleotide or polypeptide and/or agonist or antagonist of the present invention. Examples of viruses, include, but are not limited to Examples of viruses, include, but are not limited to the following DNA and RNA viruses and viral families: Arbovirus, Adenoviridae, Arenaviridae, Arterivirus, Birnaviridae, Bunyaviridae, Caliciviridae, Circoviridae, Coronaviridae, Dengue, EBV, HIV, Flaviviridae, Hepadnaviridae (Hepatitis), Herpesviridae (such as, Cytomegalovirus, Herpes Simplex, Herpes Zoster), Mononegavirus (e.g., Paramyxoviridae, Morbillivirus, Rhabdoviridae), Orthomyxoviridae (e.g., Influenza A, Influenza B, and parainfluenza), Papiloma virus, Papovaviridae, Parvoviridae, Picornaviridae, Poxviridae (such as Smallpox or Vaccinia), Reoviridae (e.g., Rotavirus), Retroviridae (HTLV-I, HTLV-II, Lentivirus), and Togaviridae (e.g., Rubivirus). Viruses falling within these families can cause a variety of diseases or symptoms, including, but not limited to: arthritis, bronchiollitis, respiratory syncytial virus, encephalitis, eye infections (e.g., conjunctivitis, keratitis), chronic fatigue syndrome, hepatitis (A, B, C, E, Chronic Active, Delta), Japanese B encephalitis, Junin, Chikungunya, Rift Valley fever, yellow fever, meningitis, opportunistic infections (e.g., AIDS), pneumonia, Burkitt's Lymphoma, chickenpox, hemorrhagic fever, Measles, Mumps, Parainfluenza, Rabies, the common cold, Polio, l0 leukemia, Rubella, sexually transmitted diseases, skin diseases (e.g., Kaposi's, warts), and viremia. polynucleotides or polypeptides, or agonists or antagonists of the invention, can be used to treat, prevent, and/or diagnose any of these symptoms or diseases. In specific embodiments, polynucleotides, polypeptides, or agonists or antagonists of the invention are used to treat, prevent, and/or diagnose: meningitis, Dengue, EBV, and/or hepatitis (e.g., hepatitis B). In an additional specific embodiment polynucleotides, polypeptides, or agonists or antagonists of the invention are used to treat patients nonresponsive to one or more other commercially available hepatitis vaccines. In a further specific embodiment polynucleotides, polypeptides, or agonists or antagonists of the invention are used to treat, prevent, and/or diagnose AIDS.

[0773] Similarly, bacterial or fungal agents that can cause disease or symptoms and that can be treated, prevented, and/or diagnosed by a polynucleotide or polypeptide and/or agonist or antagonist of the present invention include, but not limited to, include, but not limited to, the following Gram-Negative and Gram-positive bacteria and bacterial families and fungi: Actinomycetales (e.g., Corynebacterium, Mycobacterium, Norcardia), Cryptococcus neoformans, Aspergillosis, Bacillaceae (e.g., Anthrax, Clostridium), Bacteroidaceae, Blastomycosis, Bordetella, Borrelia (e.g., Borrelia burgdorferi), Brucellosis, Candidiasis, Campylobacter, Coccidioidomycosis, Cryptococcosis, Dermatocycoses, E. coli (e.g., Enterotoxigenic E. coli and Enterohemorrhagic E. coli), Enterobacteriaceae (Klebsiella, Salmonella (e.g., Salmonella typhi, and Salmonella paratyphi), Serratia, Yersinia), Erysipelothrix, Helicobacter, Legionellosis, Leptospirosis, Listeria, Mycoplasmatales, Mycobacterium leprae, Vibrio cholerae, Neisseriaceae (e.g., Acinetobacter, Gonorrhea, Menigococcal), Meisseria meningitidis, Pasteurellacea Infections (e.g., Actinobacillus, Heamophilus (e.g., Heamophilus influenza type B), Pasteurella), Pseudomonas, Rickettsiaceae, Chlamydiaceae, Syphilis, Shigella spp., Staphylococcal, Meningiococcal, Pneumococcal and Streptococcal (e.g., Streptococcus pneumoniae and Group B Streptococcus). These bacterial or fungal families can cause the following diseases or symptoms, including, but not limited to: bacteremia, endocarditis, eye infections (conjunctivitis, tuberculosis, uveitis), gingivitis, opportunistic infections (e.g., AIDS related infections), paronychia, prosthesis-related infections, Reiter's Disease, respiratory tract infections, such as Whooping Cough or Empyema, sepsis, Lyme Disease, Cat-Scratch Disease, Dysentery, Paratyphoid Fever, food poisoning, Typhoid, pneumonia, Gonorrhea, meningitis (e.g., mengitis types A and B), Chiamydia, Syphilis, Diphtheria, Leprosy, Paratuberculosis, Tuberculosis, Lupus, Botulism, gangrene, tetanus, impetigo, Rheumatic Fever, Scarlet Fever, sexually transmitted diseases, skin diseases (e.g., cellulitis, dermatocycoses), toxemia, urinary tract infections, wound infections. Polynucleotides or polypeptides, agonists or antagonists of the invention, can be used to treat, prevent, and/or diagnose any of these symptoms or diseases. In specific embodiments, polynucleotides, polypeptides, agonists or antagonists of the invention are used to treat, prevent, and/or diagnose: tetanus, Diptheria, botulism, and/or meningitis type B.

[0774] Moreover, parasitic agents causing disease or symptoms that can be treated, prevented, and/or diagnosed by a polynucleotide or polypeptide and/or agonist or antagonist of the present invention include, but not limited to, the following families or class: Amebiasis, Babesiosis, Coccidiosis, Cryptosporidiosis, Dientamoebiasis, Dourine, Ectoparasitic, Giardiasis, Helminthiasis, Leishmaniasis, Theileriasis, Toxoplasmosis, Trypanosomiasis, and Trichomonas and Sporozoans (e.g., Plasmodium virax, Plasmodium falciparium, Plasmodium malariae and Plasmodium ovale). These parasites can cause a variety of diseases or symptoms, including, but not limited to: Scabies, Trombiculiasis, eye infections, intestinal disease (e.g., dysentery, giardiasis), liver disease, lung disease, opportunistic infections (e.g., AIDS related), malaria, pregnancy complications, and toxoplasmosis. polynucleotides or polypeptides, or agonists or antagonists of the invention, can be used totreat, prevent, and/or diagnose any of these symptoms or diseases. In specific embodiments, polynucleotides, polypeptides, or agonists or antagonists of the invention are used to treat, prevent, and/or diagnose malaria.

[0775] Preferably, treatment or prevention using a polypeptide or polynucleotide and/or agonist or antagonist of the present invention could either be by administering an effective amount of a polypeptide to the patient, or by removing cells from the patient, supplying the cells with a polynucleotide of the present invention, and returning the engineered cells to the patient (ex vivo therapy). Moreover, the polypeptide or polynucleotide of the present invention can be used as an antigen in a vaccine to raise an immune response against infectious disease.

### Regeneration

[0776] A polynucleotide or polypeptide and/or agonist or antagonist of the present invention can be used to differentiate, proliferate, and attract cells, leading to the regeneration of tissues. (See, Science 276:59-87 (1997).) The regeneration of tissues could be used to repair, replace, or protect tissue damaged by congenital defects, trauma (wounds, burns, incisions, or ulcers), age, disease (e.g. osteoporosis, osteocarthritis, periodontal disease, liver failure), surgery, including cosmetic plastic surgery, fibrosis, reperfusion injury, or systemic cytokine damage.

[0777] Tissues that could be regenerated using the present invention include organs (e.g., pancreas, liver, intestine, kidney, skin, endothelium), muscle (smooth, skeletal or cardiac), vasculature (including vascular and lymphatics), nervous, hematopoietic, and skeletal (bone, cartilage, tendon, and ligament) tissue. Preferably, regeneration occurs without or decreased scarring. Regeneration also may include angiogenesis.

[0778] Moreover, a polynucleotide or polypeptide and/or agonist or antagonist of the present invention may increase regeneration of tissues difficult to heal. For example, increased tendon/ligament regeneration would quicken recovery time after damage. A polynucleotide or polypeptide and/or agonist or antagonist of the present invention could also be used prophylactically in an effort to avoid damage. Specific diseases that could be treated, prevented, and/or diagnosed include of tendinitis, carpal tunnel syndrome, and other tendon or ligament defects. A further example of tissue regeneration of non-healing wounds includes pressure ulcers, ulcers associated with vascular insufficiency, surgical, and traumatic wounds.

[0779] Similarly, nerve and brain tissue could also be regenerated by using a polynucleotide or polypeptide and/or agonist or antagonist of the present invention to proliferate and differentiate nerve cells. Diseases that could be treated, prevented, and/or diagnosed using this method include central and peripheral nervous system diseases, neuropathies, or mechanical and traumatic diseases, disorders, and/or conditions (e.g., spinal cord disorders, head trauma, cerebrovascular disease, and stoke). Specifically, diseases associated with peripheral nerve injuries, peripheral neuropathy (e.g., resulting from chemotherapy or other medical therapies), localized neuropathies, and central nervous system diseases (e.g., Alzheimer's disease, Parkinson's disease, Huntington's disease, amyotrophic lateral sclerosis, and Shy-Drager syndrome), could all be treated, prevented, and/or diagnosed using the polynucleotide or polypeptide and/or agonist or antagonist of the present invention.

### Chemotaxis

[0780] A polynucleotide or polypeptide and/or agonist or antagonist of the present invention may have chemotaxis activity. A chemotaxic molecule attracts or mobilizes cells (e.g., monocytes, fibroblasts, neutrophils, T-cells, mast cells, eosinophils, epithelial and/or endothelial cells) to a particular site in the body, such as inflammation, infection, or site of hyperproliferation. The mobilized cells can then fight off and/or heal the particular trauma or abnormality.

[0781] A polynucleotide or polypeptide and/or agonist or antagonist of the present invention may increase chemotaxic activity of particular cells. These chemotactic molecules can then be used to treat, prevent, and/or diagnose inflammation, infection, hyperproliferative diseases, disorders, and/or conditions, or any immune system disorder by increasing the number of cells targeted to a particular location in the body. For example, chemotaxic molecules can be used to treat, prevent, and/or diagnose wounds and other trauma to tissues by attracting immune cells to the injured location. Chemotactic molecules of the present invention can also attract fibroblasts, which can be used to treat, prevent, and/or diagnose wounds.

[0782] It is also contemplated that a polynucleotide or polypeptide and/or agonist or antagonist of the present invention may inhibit chemotactic activity. These molecules could also be used to treat, prevent, and/or diagnose diseases, disorders, and/or conditions. Thus, a polynucleotide or polypeptide and/or agonist or antagonist of the present invention could be used as an inhibitor of chemotaxis.

### Binding Activity

[0783] A polypeptide of the present invention may be used to screen for molecules that bind to the polypeptide or for molecules to which the polypeptide binds. The binding of the polypeptide and the molecule may activate (agonist), increase, inhibit (antagonist), or decrease activity of the polypeptide or the molecule bound. Examples of such molecules include antibodies, oligonucleotides, proteins (e.g., receptors),or small molecules.

[0784] Preferably, the molecule is closely related to the natural ligand of the polypeptide, e.g., a fragment of the ligand, or a natural substrate, a ligand, a structural or functional mimetic. (See, Coligan et al., Current Protocols in Immunology 1(2):Chapter 5 (1991).) Similarly, the molecule can be closely related to the natural receptor to which the polypeptide binds, or at least, a fragment of the receptor capable of being bound by the polypeptide (e.g., active site). In either case, the molecule can be rationally designed using known techniques.

[0785] Preferably, the screening for these molecules involves producing appropriate cells which express the polypeptide, either as a secreted protein or on the cell membrane. Preferred cells include cells from mammals, yeast, Drosophila, or E. coli. Cells expressing the polypeptide (or cell membrane containing the expressed polypeptide) are then preferably contacted with a test compound potentially containing the molecule to observe binding, stimulation, or inhibition of activity of either the polypeptide or the molecule.

[0786] The assay may simply test binding of a candidate compound to the polypeptide, wherein binding is detected by a label, or in an assay involving competition with a labeled competitor. Further, the assay may test whether the candidate compound results in a signal generated by binding to the polypeptide.

[0787] Alternatively, the assay can be carried out using cell-free preparations, polypeptide/molecule affixed to a solid support, chemical libraries, or natural product mixtures. The assay may also simply comprise the steps of mixing a candidate compound with a solution containing a polypeptide, measuring polypeptide/molecule activity or binding, and comparing the polypeptide/molecule activity or binding to a standard.

[0788] Preferably, an ELISA assay can measure polypeptide level or activity in a sample (e.g., biological sample) using a monoclonal or polyclonal antibody. The antibody can measure polypeptide level or activity by either binding, directly or indirectly, to the polypeptide or by competing with the polypeptide for a substrate.

[0789] Additionally, the receptor to which a polypeptide of the invention binds can be identified by numerous methods known to those of skill in the art, for example, ligand panning and FACS sorting (Coligan, et al., Current Protocols in Immun., 1(2), Chapter 5, (1991)). For example, expression cloning is employed wherein polyadenylated RNA is prepared from a cell responsive to the polypeptides, for example, NIH3T3 cells which are known to contain multiple receptors for the FGF family proteins, and SC-3 cells, and a cDNA library created from this RNA is divided into pools and used to transfect COS cells or other cells that are not responsive to the polypeptides. Transfected cells which are grown on glass slides are exposed to the polypeptide of the present invention, after they have been labeled. The polypeptides can be labeled by a variety of means including iodination or inclusion of a recognition site for a site-specific protein kinase.

[0790] Following fixation and incubation, the slides are subjected to auto-radiographic analysis. Positive pools are identified and sub-pools are prepared and re-transfected using an iterative sub-pooling and re-screening process, eventually yielding a single clones that encodes the putative receptor.

[0791] As an alternative approach for receptor identification, the labeled polypeptides can be photoaffinity linked with cell membrane or extract preparations that express the receptor molecule. Cross-linked material is resolved by PAGE analysis and exposed to X-ray film. The labeled complex containing the receptors of the polypeptides can be excised, resolved into peptide fragments, and subjected to protein microsequencing. The amino acid sequence obtained from microsequencing would be used to design a set of degenerate oligonucleotide probes to screen a cDNA library to identify the genes encoding the putative receptors.

[0792] Moreover, the techniques of gene-shuffling, motif-shuffling, exon-shuffling, and/or codon-shuffling (collectively referred to as “DNA shuffling”) may be employed to modulate the activities of polypeptides of the invention thereby effectively generating agonists and antagonists of polypeptides of the invention. See generally, U.S. Pat. Nos. 5,605,793, 5,811,238, 5,830,721, 5,834,252, and 5,837,458, and Patten, P. A., et al., Curr. Opinion Biotechnol. 8:724-33 (1997); Harayama, S. Trends Biotechnol. 16(2):76-82 (1998); Hansson, L. O., et al., J. Mol. Biol. 287:265-76 (1999); and Lorenzo, M. M. and Blasco, R. Biotechniques 24(2):308-13 (1998) (each of these patents and publications are hereby incorporated by reference). In one embodiment, alteration of polynucleotides and corresponding polypeptides of the invention may be achieved by DNA shuffling. DNA shuffling involves the assembly of two or more DNA segments into a desired polynucleotide sequence of the invention molecule by homologous, or site-specific, recombination. In another embodiment, polynucleotides and corresponding polypeptides of the invention may be altered by being subjected to random mutagenesis by error-prone PCR, random nucleotide insertion or other methods prior to recombination. In another embodiment, one or more components, motifs, sections, parts, domains, fragments, etc., of the polypeptides of the invention may be recombined with one or more components, motifs, sections, parts, domains, fragments, etc. of one or more heterologous molecules. In preferred embodiments, the heterologous molecules are family members. In further preferred embodiments, the heterologous molecule is a growth factor such as, for example, platelet-derived growth factor (PDGF), insulin-like growth factor (IGF-I), transforming growth factor (TGF)-alpha, epidermal growth factor (EGF), fibroblast growth factor (FGF), TGF-beta, bone morphogenetic protein (BMP)-2, BMP-4, BMP-5, BMP-6, BMP-7, activins A and B, decapentaplegic(dpp), 60A, OP-2, dorsalin, growth differentiation factors (GDFs), nodal, MIS, inhibin-alpha, TGF-betal, TGF-beta2, TGF-beta3, TGF-beta5, and glial-derived neurotrophic factor (GDNF).

[0793] Other preferred fragments are biologically active fragments of the polypeptides of the invention. Biologically active fragments are those exhibiting activity similar, but not necessarily identical, to an activity of the polypeptide. The biological activity of the fragments may include an improved desired activity, or a decreased undesirable activity.

[0794] Additionally, this invention provides a method of screening compounds to identify those which modulate the action of the polypeptide of the present invention. An example of such an assay comprises combining a mammalian fibroblast cell, a the polypeptide of the present invention, the compound to be screened and 3[H] thymidine under cell culture conditions where the fibroblast cell would normally proliferate. A control assay may be performed in the absence of the compound to be screened and compared to the amount of fibroblast proliferation in the presence of the compound to determine if the compound stimulates proliferation by determining the uptake of 3[H] thymidine in each case. The amount of fibroblast cell proliferation is measured by liquid scintillation chromatography which measures the incorporation of 3[H] thymidine. Both agonist and antagonist compounds may be identified by this procedure.

[0795] In another method, a mammalian cell or membrane preparation expressing a receptor for a polypeptide of the present invention is incubated with a labeled polypeptide of the present invention in the presence of the compound. The ability of the compound to enhance or block this interaction could then be measured. Alternatively, the response of a known second messenger system following interaction of a compound to be screened and the receptor is measured and the ability of the compound to bind to the receptor and elicit a second messenger response is measured to determine if the compound is a potential agonist or antagonist. Such second messenger systems include but are not limited to, cAMP guanylate cyclase, ion channels or phosphoinositide hydrolysis.

[0796] All of these above assays can be used as diagnostic or prognostic markers. The molecules discovered using these assays can be used to treat, prevent, and/or diagnose disease or to bring about a particular result in a patient (e.g., blood vessel growth) by activating or inhibiting the polypeptide/molecule. Moreover, the assays can discover agents which may inhibit or enhance the production of the polypeptides of the invention from suitably manipulated cells or tissues. Therefore, the invention includes a method of identifying compounds which bind to the polypeptides of the invention comprising the steps of: (a) incubating a candidate binding compound with the polypeptide; and (b) determining if binding has occurred. Moreover, the invention includes a method of identifying agonists/antagonists comprising the steps of: (a) incubating a candidate compound with the polypeptide, (b) assaying a biological activity, and (b) determining if a biological activity of the polypeptide has been altered.

[0797] Also, one could identify molecules bind a polypeptide of the invention experimentally by using the beta-pleated sheet regions contained in the polypeptide sequence of the protein. Accordingly, specific embodiments of the invention are directed to polynucleotides encoding polypeptides which comprise, or alternatively consist of, the amino acid sequence of each beta pleated sheet regions in a disclosed polypeptide sequence. Additional embodiments of the invention are directed to polynucleotides encoding polypeptides which comprise, or alternatively consist of, any combination or all of contained in the polypeptide sequences of the invention. Additional preferred embodiments of the invention are directed to polypeptides which comprise, or alternatively consist of, the amino acid sequence of each of the beta pleated sheet regions in one of the polypeptide sequences of the invention. Additional embodiments of the invention are directed to polypeptides which comprise, or alternatively consist of, any combination or all of the beta pleated sheet regions in one of the polypeptide sequences of the invention.

### Targeted Delivery

[0798] In another embodiment, the invention provides a method of delivering compositions to targeted cells expressing a receptor for a polypeptide of the invention, or cells expressing a cell bound form of a polypeptide of the invention.

[0799] As discussed herein, polypeptides or antibodies of the invention may be associated with heterologous polypeptides, heterologous nucleic acids, toxins, or prodrugs via hydrophobic, hydrophilic, ionic and/or covalent interactions. In one embodiment, the invention provides a method for the specific delivery of compositions of the invention to cells by administering polypeptides of the invention (including antibodies) that are associated with heterologous polypeptides or nucleic acids. In one example, the invention provides a method for delivering a therapeutic protein into the targeted cell. In another example, the invention provides a method for delivering a single stranded nucleic acid (e.g., antisense or ribozymes) or double stranded nucleic acid (e.g., DNA that can integrate into the cell's genome or replicate episomally and that can be transcribed) into the targeted cell.

[0800] In another embodiment, the invention provides a method for the specific destruction of cells (e.g., the destruction of tumor cells) by administering polypeptides of the invention (e.g., polypeptides of the invention or antibodies of the invention) in association with toxins or cytotoxic prodrugs.

[0801] By “toxin” is meant compounds that bind and activate endogenous cytotoxic effector systems, radioisotopes, holotoxins, modified toxins, catalytic subunits of toxins, or any molecules or enzymes not normally present in or on the surface of a cell that under defined conditions cause the cell's death. Toxins that may be used according to the methods of the invention include, but are not limited to, radioisotopes known in the art, compounds such as, for example, antibodies (or complement fixing containing portions thereof) that bind an inherent or induced endogenous cytotoxic effector system, thymidine kinase, endonuclease, RNAse, alpha toxin, ricin, abrin, Pseudomonas exotoxin A, diphtheria toxin, saporin, momordin, gelonin, pokeweed antiviral protein, alpha-sarcin and cholera toxin. By “cytotoxic prodrug” is meant a non-toxic compound that is converted by an enzyme, normally present in the cell, into a cytotoxic compound. Cytotoxic prodrugs that may be used according to the methods of the invention include, but are not limited to, glutamyl derivatives of benzoic acid mustard alkylating agent, phosphate derivatives of etoposide or mitomycin C, cytosine arabinoside, daunorubisin, and phenoxyacetamide derivatives of doxorubicin.

### Drug Screening

[0802] Further contemplated is the use of the polypeptides of the present invention, or the polynucleotides encoding these polypeptides, to screen for molecules which modify the activities of the polypeptides of the present invention. Such a method would include contacting the polypeptide of the present invention with a selected compound(s) suspected of having antagonist or agonist activity, and assaying the activity of these polypeptides following binding.

[0803] This invention is particularly useful for screening therapeutic compounds by using the polypeptides of the present invention, or binding fragments thereof, in any of a variety of drug screening techniques. The polypeptide or fragment employed in such a test may be affixed to a solid support, expressed on a cell surface, free in solution, or located intracellularly. One method of drug screening utilizes eukaryotic or prokaryotic host cells which are stably transformed with recombinant nucleic acids expressing the polypeptide or fragment. Drugs are screened against such transformed cells in competitive binding assays. One may measure, for example, the formulation of complexes between the agent being tested and a polypeptide of the present invention.

[0804] Thus, the present invention provides methods of screening for drugs or any other agents which affect activities mediated by the polypeptides of the present invention. These methods comprise contacting such an agent with a polypeptide of the present invention or a fragment thereof and assaying for the presence of a complex between the agent and the polypeptide or a fragment thereof, by methods well known in the art. In such a competitive binding assay, the agents to screen are typically labeled. Following incubation, free agent is separated from that present in bound form, and the amount of free or uncomplexed label is a measure of the ability of a particular agent to bind to the polypeptides of the present invention.

[0805] Another technique for drug screening provides high throughput screening for compounds having suitable binding affinity to the polypeptides of the present invention, and is described in great detail in European Patent Application 84/03564, published on Sep. 13, 1984, which is incorporated herein by reference herein. Briefly stated, large numbers of different small peptide test compounds are synthesized on a solid substrate, such as plastic pins or some other surface. The peptide test compounds are reacted with polypeptides of the present invention and washed. Bound polypeptides are then detected by methods well known in the art. Purified polypeptides are coated directly onto plates for use in the aforementioned drug screening techniques. In addition, non-neutralizing antibodies may be used to capture the peptide and immobilize it on the solid support.

[0806] This invention also contemplates the use of competitive drug screening assays in which neutralizing antibodies capable of binding polypeptides of the present invention specifically compete with a test compound for binding to the polypeptides or fragments thereof. In this manner, the antibodies are used to detect the presence of any peptide which shares one or more antigenic epitopes with a polypeptide of the invention.

### Antisense And Ribozyme (Antagonists)

[0807] In specific embodiments, antagonists according to the present invention are nucleic acids corresponding to the sequences contained in SEQ ID NO:5, 7, 9, 11, 13, 15, 17, 19, 21, 23, 25, 27, 29, 31, 33, 35, 37, 39, 41, 43, 45, 47, 49, and/or 603, or the complementary strand thereof. In one embodiment, antisense sequence is generated internally by the organism, in another embodiment, the antisense sequence is separately administered (see, for example, O° Connor, Neurochem., 56:560 (1991). Oligodeoxynucleotides as Antisense Inhibitors of Gene Expression, CRC Press, Boca Raton, Fla. (1988). Antisense technology can be used to control gene expression through antisense DNA or RNA, or through triple-helix formation. Antisense techniques are discussed for example, in Okano, Neurochem., 56:560 (1991); Oligodeoxynucleotides as Antisense Inhibitors of Gene Expression, CRC Press, Boca Raton, Fla. (1988). Triple helix formation is discussed in, for instance, Lee et al., Nucleic Acids Research, 6:3073 (1979); Cooney et al., Science, 241:456 (1988); and Dervan et ,al., Science, 251:1300 (1991). The methods are based on binding of a polynucleotide to a complementary DNA or RNA.

[0808] For example, the use of c-myc and c-myb antisense RNA constructs to inhibit the growth of the non-lymphocytic leukemia cell line HL-60 and other cell lines was previously described. (Wickstrom et al. (1988); Anfossi et al. (1989)). These experiments were performed in vitro by incubating cells with the oligoribonucleotide. A similar procedure for in vivo use is described in WO 91/15580. Briefly, a pair of oligonucleotides for a given antisense RNA is produced as follows: A sequence complimentary to the first 15 bases of the open reading frame is flanked by an EcoR1 site on the 5 end and a HindIII site on the 3 end. Next, the pair of oligonucleotides is heated at 90° C. for one minute and then annealed in 2× ligation buffer (20 mM TRIS HCl pH 7.5, 10 mM MgCT2, 10MM dithiothreitol (DTT) and 0.2 mM ATP) and then ligated to the EcoR1/Hind III site of the retroviral vector PMV7 (WO 91/15580).

[0809] For example, the 5′ coding portion of a polynucleotide that encodes the mature polypeptide of the present invention may be used to design an antisense RNA oligonucleotide of from about 10 to 40 base pairs in length. A DNA oligonucleotide is designed to be complementary to a region of the gene involved in transcription thereby preventing transcription and the production of the receptor. The antisense RNA oligonucleotide hybridizes to the mRNA in vivo and blocks translation of the mRNA molecule into receptor polypeptide.

[0810] In one embodiment, the antisense nucleic acid of the invention is produced intracellularly by transcription from an exogenous sequence. For example, a vector or a portion thereof, is transcribed, producing an antisense nucleic acid (RNA) of the invention. Such a vector would contain a sequence encoding the antisense nucleic acid of the invention. Such a vector can remain episomal or become chromosomally integrated, as long as it can be transcribed to produce the desired antisense RNA. Such vectors can be constructed by recombinant DNA technology methods standard in the art. Vectors can be plasmid, viral, or others known in the art, used for replication and expression in vertebrate cells. Expression of the sequence encoding a polypeptide of the invention, or fragments thereof, can be by any promoter known in the art to act in vertebrate, preferably human cells. Such promoters can be inducible or constitutive. Such promoters include, but are not limited to, the SV40 early promoter region (Bernoist and Chambon, Nature, 29:304-310 (1981), the promoter contained in the 3′ long terminal repeat of Rous sarcoma virus (Yamamoto et al., Cell, 22:787-797 (1980), the herpes thymidine promoter (Wagner et al., Proc. Natl. Acad. Sci. U.S.A., 78:1441-1445 (1981), the regulatory sequences of the metallothionein gene (Brinster et al., Nature, 296:39-42 (1982)), etc.

[0811] The antisense nucleic acids of the invention comprise a sequence complementary to at least a portion of an RNA transcript of a gene of interest. However, absolute complementarity, although preferred, is not required. A sequence “complementary to at least a portion of an RNA,” referred to herein, means a sequence having sufficient complementarity to be able to hybridize with the RNA, forming a stable duplex; in the case of double stranded antisense nucleic acids of the invention, a single strand of the duplex DNA may thus be tested, or triplex formation may be assayed. The ability to hybridize will depend on both the degree of complementarity and the length of the antisense nucleic acid Generally, the larger the hybridizing nucleic acid, the more base mismatches with a RNA sequence of the invention it may contain and still form a stable duplex (or triplex as the case may be). One skilled in the art can ascertain a tolerable degree of mismatch by use of standard procedures to determine the melting point of the hybridized complex.

[0812] Oligonucleotides that are complementary to the 5′ end of the message, e.g., the 5′ untranslated sequence up to and including the AUG initiation codon, should work most efficiently at inhibiting translation. However, sequences complementary to the 3′ untranslated sequences of mRNAs have been shown to be effective at inhibiting translation of mRNAs as well. See generally, Wagner, R., Nature, 372:333-335 (1994). Thus, oligonucleotides complementary to either the 5′- or 3′- non-translated, non-coding regions of a polynucleotide sequence of the invention could be used in an antisense approach to inhibit translation of endogenous mRNA. Oligonucleotides complementary to the 5′ untranslated region of the mRNA should include the complement of the AUG start codon. Antisense oligonucleotides complementary to mRNA coding regions are less efficient inhibitors of translation but could be used in accordance with the invention. Whether designed to hybridize to the 5′-, 3′- or coding region of mRNA, antisense nucleic acids should be at least six nucleotides in length, and are preferably oligonucleotides ranging from 6 to about 50 nucleotides in length. In specific aspects the oligonucleotide is at least 10 nucleotides, at least 17 nucleotides, at least 25 nucleotides or at least 50 nucleotides.

[0813] The polynucleotides of the invention can be DNA or RNA or chimeric mixtures or derivatives or modified versions thereof, single-stranded or double-stranded. The oligonucleotide can be modified at the base moiety, sugar moiety, or phosphate backbone, for example, to improve stability of the molecule, hybridization, etc. The oligonucleotide may include other appended groups such as peptides (e.g., for targeting host cell receptors in vivo), or agents facilitating transport across the cell membrane (see, e.g., Letsinger et al., Proc. Natl. Acad. Sci. U.S.A. 86:6553-6556 (1989); Lemaitre et al., Proc. Natl. Acad. Sci., 84:648-652 (1987); PCT Publication NO: W088/09810, published Dec. 15, 1988) or the blood-brain barrier (see, e.g., PCT Publication NO: W089/10134, published Apr. 25, 1988), hybridization-triggered cleavage agents. (See, e.g., Krol et al., BioTechniques, 6:958-976 (1988)) or intercalating agents. (See, e.g., Zon, Pharm. Res., 5:539-549 (1988)). To this end, the oligonucleotide may be conjugated to another molecule, e.g., a peptide, hybridization triggered cross-linking agent, transport agent, hybridization-triggered cleavage agent, etc.

[0814] The antisense oligonucleotide may comprise at least one modified base moiety which is selected from the group including, but not limited to, 5-fluorouracil, 5-bromouracil, 5-chlorouracil, 5-iodouracil, hypoxanthine, xanthine, 4-acetylcytosine, 5-(carboxyhydroxylmethyl) uracil, 5-carboxymethylaminomethyl-2-thiouridine, 5-carboxymethylaminomethyluracil, dihydrouracil, beta-D-galactosylqueosine, inosine, N6-isopentenyladenine, 1-methylguanine, 1 -methylinosine, 2,2-dimethylguanine, 2-methyladenine, 2-methylguanine, 3-methylcytosine, 5-methylcytosine, N6-adenine, 7-methylguanine, 5-methylaminomethyluracil, 5-methoxyaminomethyl-2-thiouracil, beta-D-mannosylqueosine, 5′-methoxycarboxymethyluracil, 5-methoxyuracil, 2-methylthio-N6-isopentenyladenine, uracil-5-oxyacetic acid (v), wybutoxosine, pseudouracil, queosine, 2-thiocytosine, 5-methyl-2-thiouracil, 2-thiouracil, 4-thiouracil, 5-methyluracil, uracil-5-oxyacetic acid methylester, uracil-5-oxyacetic acid (v), 5-methyl-2-thiouracil, 3-(3-amino-3-N-2-carboxypropyl) uracil, (acp3)w, and 2,6-diaminopurine.

[0815] The antisense oligonucleotide may also comprise at least one modified sugar moiety selected from the group including, but not limited to, arabinose, 2-fluoroarabinose, xylulose, and hexose.

[0816] In yet another embodiment, the antisense oligonucleotide comprises at least one modified phosphate backbone selected from the group including, but not limited to, a phosphorothioate, a phosphorodithioate, a phosphoramidothioate, a phosphoramidate, a phosphordiamidate, a methylphosphonate, an alkyl phosphotriester, and a formacetal or analog thereof.

[0817] In yet another embodiment, the antisense oligonucleotide is an a-anomeric oligonucleotide. An a-anomeric oligonucleotide forms specific double-stranded hybrids with complementary RNA in which, contrary to the usual b-units, the strands run parallel to each other (Gautier et al., Nucl. Acids Res., 15:6625-6641 (1987)). The oligonucleotide is a 2-0-methylribonucleotide (Inoue et al., Nucl. Acids Res., 15:6131-6148 (1987)), or a chimeric RNA-DNA analogue (Inoue et al., FEBS Lett. 215:327-330 (1987)).

[0818] Polynucleotides of the invention may be synthesized by standard methods known in the art, e.g. by use of an automated DNA synthesizer (such as are commercially available from Biosearch, Applied Biosystems, etc.). As examples, phosphorothioate oligonucleotides may be synthesized by the method of Stein et al. (Nucl. Acids Res., 16:3209 (1988)), methylphosphonate oligonucleotides can be prepared by use of controlled pore glass polymer supports (Sarin et al., Proc. Natl. Acad. Sci. U.S.A., 85:7448-7451 (1988)), etc.

[0819] While antisense nucleotides complementary to the coding region sequence of the invention could be used, those complementary to the transcribed untranslated region are most preferred.

[0820] Potential antagonists according to the invention also include catalytic RNA, or a ribozyme (See, e.g., PCT International Publication WO 90/11364, published Oct. 4, 1990; Sarver et al, Science, 247:1222-1225 (1990). While ribozymes that cleave mRNA at site specific recognition sequences can be used to destroy mRNAs corresponding to the polynucleotides of the invention, the use of hammerhead ribozymes is preferred. Hammerhead ribozymes cleave mRNAs at locations dictated by flanking regions that form complementary base pairs with the target mRNA. The sole requirement is that the target mRNA have the following sequence of two bases: 5′-UG-3′. The construction and production of hammerhead ribozymes is well known in the art and is described more fully in Haseloff and Gerlach, Nature, 334:585-591 (1988). There are numerous potential hammerhead ribozyme cleavage sites within each nucleotide sequence disclosed in the sequence listing. Preferably, the ribozyme is engineered so that the cleavage recognition site is located near the 5′ end of the mRNA corresponding to the polynucleotides of the invention; i.e., to increase efficiency and minimize the intracellular accumulation of non-functional mRNA transcripts.

[0821] As in the antisense approach, the ribozymes of the invention can be composed of modified oligonucleotides (e.g. for improved stability, targeting, etc.) and should be delivered to cells which express the polynucleotides of the invention in vivo. DNA constructs encoding the ribozyme may be introduced into the cell in the same manner as described above for the introduction of antisense encoding DNA. A preferred method of delivery involves using a DNA construct “encoding” the ribozyme under the control of a strong constitutive promoter, such as, for example, pol III or pol II promoter, so that transfected cells will produce sufficient quantities of the ribozyme to destroy endogenous messages and inhibit translation. Since ribozymes unlike antisense molecules, are catalytic, a lower intracellular concentration is required for efficiency.

[0822] Antagonist/agonist compounds may be employed to inhibit the cell growth and proliferation effects of the polypeptides of the present invention on neoplastic cells and tissues, i.e. stimulation of angiogenesis of tumors, and, therefore, retard or prevent abnormal cellular growth and proliferation, for example, in tumor formation or growth.

[0823] The antagonist/agonist may also be employed to prevent hyper-vascular diseases, and prevent the proliferation of epithelial lens cells after extracapsular cataract surgery. Prevention of the mitogenic activity of the polypeptides of the present invention may also be desirous in cases such as restenosis after balloon angioplasty.

[0824] The antagonist/agonist may also be employed to prevent the growth of scar tissue during wound healing.

[0825] The antagonist/agonist may also be employed to treat, prevent, and/or diagnose the diseases described herein.

[0826] Thus, the invention provides a method of treating or preventing diseases, disorders, and/or conditions, including but not limited to the diseases, disorders, and/or conditions listed throughout this application, associated with overexpression of a polynucleotide of the present invention by administering to a patient (a) an antisense molecule directed to the polynucleotide of the present invention, and/or (b) a ribozyme directed to the polynucleotide of the present invention. invention, and/or (b) a ribozyme directed to the polynucleotide of the present invention.

### Biotic Associations

[0827] A polynucleotide or polypeptide and/or agonist or antagonist of the present invention may increase the organisms ability, either directly or indirectly, to initiate and/or maintain biotic associations with other organisms. Such associations may be symbiotic, nonsymbiotic, endosymbiotic, macrosymbiotic, and/or microsymbiotic in nature. In general, a polynucleotide or polypeptide and/or agonist or antagonist of the present invention may increase the organisms ability to form biotic associations with any member of the fungal, bacterial, lichen, mycorrhizal, cyanobacterial, dinoflaggellate, and/or algal, kingdom, phylums, families, classes, genuses, and/or species.

[0828] The mechanism by which a polynucleotide or polypeptide and/or agonist or antagonist of the present invention may increase the host organisms ability, either directly or indirectly, to initiate and/or maintain biotic associations is variable, though may include, modulating osmolarity to desirable levels for the symbiont, modulating pH to desirable levels for the symbiont, modulating secretions of organic acids, modulating the secretion of specific proteins, phenolic compounds, nutrients, or the increased expression of a protein required for host-biotic organisms interactions (e.g., a receptor, ligand, etc.). Additional mechanisms are known in the art and are encompassed by the invention (see, for example, “Microbial Signalling and Communication”, eds., R. England, G. Hobbs, N. Bainton, and D. McL. Roberts, Cambridge University Press, Cambridge, (1999); which is hereby incorporated herein by reference).

[0829] In an alternative embodiment, a polynucleotide or polypeptide and/or agonist or antagonist of the present invention may decrease the host organisms ability to form biotic associations with another organism, either directly or indirectly. The mechanism by which a polynucleotide or polypeptide and/or agonist or antagonist of the present invention may decrease the host organisms ability, either directly or indirectly, to initiate and/or maintain biotic associations with another organism is variable, though may include, modulating osmolarity to undesirable levels, modulating pH to undesirable levels, modulating secretions of organic acids, modulating the secretion of specific proteins, phenolic compounds, nutrients, or the decreased expression of a protein required for host-biotic organisms interactions (e.g., a receptor, ligand, etc.). Additional mechanisms are known in the art and are encompassed by the invention (see, for example, “Microbial Signalling and Communication”, eds., R. England, G. Hobbs, N. Bainton, and D. McL. Roberts, Cambridge University Press, Cambridge, (1999); which is hereby incorporated herein by reference).

[0830] The hosts ability to maintain biotic associations with a particular pathogen has significant implications for the overall health and fitness of the host. For example, human hosts have symbiosis with enteric bacteria in their gastrointestinal tracts, particularly in the small and large intestine. In fact, bacteria counts in feces of the distal colon often approach 10¹² per milliliter of feces. Examples of bowel flora in the gastrointestinal tract are members of the Enterobacteriaceae, Bacteriodes, in addition to a-hemolytic streptococci, E. coli, Bifobacteria, Anaerobic cocci, Eubacteria, Costridia, lactobacilli, and yeasts. Such bacteria, among other things, assist the host in the assimilation of nutrients by breaking down food stuffs not typically broken down by the hosts digestive system, particularly in the hosts bowel. Therefore, increasing the hosts ability to maintain such a biotic association would help assure proper nutrition for the host.

[0831] Aberrations in the enteric bacterial population of mammals, particularly humans, has been associated with the following disorders: diarrhea, ileus, chronic inflammatory disease, bowel obstruction, duodenal diverticula, biliary calculous disease, and malnutrition. A polynucleotide or polypeptide and/or agonist or antagonist of the present invention are useful for treating, detecting, diagnosing, prognosing, and/or ameliorating, either directly or indirectly, and of the above mentioned diseases and/or disorders associated with aberrant enteric flora population.

[0832] The composition of the intestinal flora, for example, is based upon a variety of factors, which include, but are not limited to, the age, race, diet, malnutrition, gastric acidity, bile salt excretion, gut motility, and immune mechanisms. As a result, the polynucleotides and polypeptides, including agonists, antagonists, and fragments thereof, may modulate the ability of a host to form biotic associations by affecting, directly or indirectly, at least one or more of these factors.

[0833] Although the predominate intestinal flora comprises anaerobic organisms, an underlying percentage represents aerobes (e.g., E. coli). This is significant as such aerobes rapidly become the predominate organisms in intraabdominal infections—effectively becoming opportunistic early in infection pathogenesis. As a result, there is an intrinsic need to control aerobe populations, particularly for immune compromised individuals.

[0834] In a preferred embodiment, a polynucleotides and polypeptides, including agonists, antagonists, and fragments thereof, are useful for inhibiting biotic associations with specific enteric symbiont organisms in an effort to control the population of such organisms.

[0835] Biotic associations occur not only in the gastrointestinal tract, but also on an in the integument. As opposed to the gastrointestinal flora, the cutaneous flora is comprised almost equally with aerobic and anaerobic organisms. Examples of cutaneous flora are members of the gram-positive cocci (e.g., S. aureus, coagulase-negative staphylococci, micrococcus, M.sedentarius), gram-positive bacilli (e.g., Corynebacterium species, C. minutissimum, Brevibacterium species, Propoionibacterium species, P.acnes), gram-negative bacilli (e.g., Acinebacter species), and fungi (Pityrosporum orbiculare). The relatively low number of flora associated with the integument is based upon the inability of many organisms to adhere to the skin. The organisms referenced above have acquired this unique ability. Therefore, the polynucleotides and polypeptides of the present invention may have uses which include modulating the population of the cutaneous flora, either directly or indirectly.

[0836] Aberrations in the cutaneous flora are associated with a number of significant diseases and/or disorders, which include, but are not limited to the following: impetigo, ecthyma, blistering distal dactulitis, pustules, folliculitis, cutaneous abscesses, pitted keratolysis, trichomycosis axcillaris, dermatophytosis complex, axillary odor, erthyrasma, cheesy foot odor, acne, tinea versicolor, seborrheic dermititis, and Pityrosporum folliculitis, to name a few. A polynucleotide or polypeptide and/or agonist or antagonist of the present invention are useful for treating, detecting, diagnosing, prognosing, and/or ameliorating, either directly or indirectly, and of the above mentioned diseases and/or disorders associated with aberrant cutaneous flora population.

[0837] Additional biotic associations, including diseases and disorders associated with the aberrant growth of such associations, are known in the art and are encompassed by the invention. See, for example, “Infectious Disease”, Second Edition, Eds., S. L., Gorbach, J. G., Bartlett, and N. R., Blacklow, W.B. Saunders Company, Philadelphia, (1998); which is hereby incorporated herein by reference).

### Pheromones

[0838] In another embodiment, a polynucleotide or polypeptide and/or agonist or antagonist of the present invention may increase the organisms ability to synthesize and/or release a pheromone. Such a pheromone may, for example, alter the organisms behavior and/or metabolism.

[0839] A polynucleotide or polypeptide and/or agonist or antagonist of the present invention may modulate the biosynthesis and/or release of pheromones, the organisms ability to respond to pheromones (e.g., behaviorally, and/or metabolically), and/or the organisms ability to detect pheromones. Preferably, any of the pheromones, and/or volatiles released from the organism, or induced, by a polynucleotide or polypeptide and/or agonist or antagonist of the invention have behavioral effects the organism.

### Other Activities

[0840] The polypeptide of the present invention, as a result of the ability to stimulate vascular endothelial cell growth, may be employed in treatment for stimulating re-vascularization of ischemic tissues due to various disease conditions such as thrombosis, arteriosclerosis, and other cardiovascular conditions. These polypeptide may also be employed to stimulate angiogenesis and limb regeneration, as discussed above.

[0841] The polypeptide may also be employed for treating wounds due to injuries, burns, post-operative tissue repair, and ulcers since they are mitogenic to various cells of different origins, such as fibroblast cells and skeletal muscle cells, and therefore, facilitate the repair or replacement of damaged or diseased tissue.

[0842] The polypeptide of the present invention may also be employed stimulate neuronal growth and to treat, prevent, and/or diagnose neuronal damage which occurs in certain neuronal disorders or neuro-degenerative conditions such as Alzheimer's disease, Parkinson's disease, and AIDS-related complex. The polypeptide of the invention may have the ability to stimulate chondrocyte growth, therefore, they may be employed to enhance bone and periodontal regeneration and aid in tissue transplants or bone grafts.

[0843] The polypeptide of the present invention may be also be employed to prevent skin aging due to sunburn by stimulating keratinocyte growth.

[0844] The polypeptide of the invention may also be employed for preventing hair loss, since FGF family members activate hair-forming cells and promotes melanocyte growth. Along the same lines, the polypeptides of the present invention may be employed to stimulate growth and differentiation of hematopoietic cells and bone marrow cells when used in combination with other cytokines.

[0845] The polypeptide of the invention may also be employed to maintain organs before transplantation or for supporting cell culture of primary tissues.

[0846] The polypeptide of the present invention may also be employed for inducing tissue of mesodermal origin to differentiate in early embryos.

[0847] The polypeptide or polynucleotides and/or agonist or antagonists of the present invention may also increase or decrease the differentiation or proliferation of embryonic stem cells, besides, as discussed above, hematopoietic lineage.

[0848] The polypeptide or polynucleotides and/or agonist or antagonists of the present invention may also be used to modulate mammalian characteristics, such as body height, weight, hair color, eye color, skin, percentage of adipose tissue, pigmentation, size, and shape (e.g., cosmetic surgery). Similarly, polypeptides or polynucleotides and/or agonist or antagonists of the present invention may be used to modulate mammalian metabolism affecting catabolism, anabolism, processing, utilization, and storage of energy.

[0849] Polypeptide or polynucleotides and/or agonist or antagonists of the present invention may be used to change a mammal's mental state or physical state by influencing biorhythms, caricadic rhythms, depression (including depressive diseases, disorders, and/or conditions), tendency for violence, tolerance for pain, reproductive capabilities (preferably by Activin or Inhibin-like activity), hormonal or endocrine levels, appetite, libido, memory, stress, or other cognitive qualities.

[0850] Polypeptide or polynucleotides and/or agonist or antagonists of the present invention may also be used to prepare individuals for extraterrestrial travel, low gravity environments, prolonged exposure to extraterrestrial radiation levels, low oxygen levels, reduction of metabolic activity, exposure to extraterrestrial pathogens, etc. Such a use may be administered either prior to an extraterrestrial event, during an extraterrestrial event, or both. Moreover, such a use may result in a number of beneficial changes in the recipient, such as, for example, any one of the following, non-limiting, effects: an increased level of hematopojetic cells, particularly red blood cells which would aid the recipient in coping with low oxygen levels; an increased level of B-cells, T-cells, antigen presenting cells, and/or macrophages, which would aid the recipient in coping with exposure to extraterrestrial pathogens, for example; a temporary (i.e., reversible) inhibition of hematopoictic cell production which would aid the recipient in coping with exposure to extraterrestrial radiation levels; increase and/or stability of bone mass which would aid the recipient in coping with low gravity environments; and/or decreased metabolism which would effectively facilitate the recipients ability to prolong their extraterrestrial travel by any one of the following, non-limiting means: (i) aid, the recipient by decreasing their basal daily energy requirements; (ii) effectively lower the level of oxidative and/or metabolic stress in recipient (i.e., to enable recipient to cope with increased extraterrestial radiation levels by decreasing the level of internal oxidative/metabolic damage acquired during normal basal energy requirements; and/or (iii) enabling recipient to subsist at a lower metabolic temperature (i.e., cryogenic, and/or sub-cryogenic environment).

[0851] Polypeptide or polynucleotides and/or agonist or antagonists of the present invention may also be used to increase the efficacy of a pharmaceutical composition, either directly or indirectly. Such a use may be administered in simultaneous conjunction with said pharmaceutical, or separately through either the same or different route of administration (e.g., intravenous for the polynucleotide or polypeptide of the present invention, and orally for the pharmaceutical, among others described herein.).

[0852] Polypeptide or polynucleotides and/or agonist or antagonists of the present invention may also be used as a food additive or preservative, such as to increase or decrease storage capabilities, fat content, lipid, protein, carbohydrate, vitamins, minerals, cofactors or other nutritional components.

### EXAMPLES

### Example 1

### Method Of Discovering The Single Nucleotide Polymorphisms (SNPs) Of The Present Invention

[0853] Candidate genes for SNP discovery were chosen based upon the knowledge that they transport, either directly, or indirectly, statins. Specifically, the following genes were analyzed for the presence of potential SNPs: OATP2, solute carrier family 21 member 6 protein (HGNC ID: SLC21A6), and cMOAT, ATP-binding cassette sub-family C member 2 protein (HGNC_ID: ABCC2).

[0854] SNP discovery was based on comparative DNA sequencing of PCR products derived from genomic DNA from multiple individuals. All the genomic DNA samples were purchased from Coriell Institute (Collingswood, N.J.) unless stated otherwise (see Table VII). 24 samples were obtained from Coriell with the samples representing eight members of each ethnic group: Caucasians, African, American, and Asian (mainly Chinese and Japanese). PCR amplicons were designed to cover the entire coding region of the exons using the Primer3 program (Rozen S 2000). Exon-intron structure of candidate genes and intron sequences were obtained by blastn search of Genbank cDNA sequences against the human genome draft sequences. The sizes of these PCR amplicons varied according to the exon-intron structure. All the samples amplified from genomic DNA (20 ng) in reactions (50 ul) containing 10 mM Tris-Cl pH 8.3, 50 mM KCl, 2.5 mM MgCl₂, 150 uM dNTPs, 3 uM PCR primers, and 3.75 U TaqGold DNA polymerase (PE Biosystems).

[0855] PCR was performed in MJ Research Tetrad machines under a cycling condition of 94 degrees 10 min, 30 cycles of 94 degrees 30 sec, 60 degrees 30 sec, and 72 degrees 30 sec, followed by 72 degrees 7 min. PCR products were purified using QIAquick PCR purification kit (Qiagen), and were sequenced by the dye-terminator method using PRISM 3700 automated DNA sequencer (Applied Biosystems, Foster City, Calif.) following the manufacturer's instruction outlined in the Owner's Manual (which is hereby incorporated herein by reference in its entirety). Sequencing results were analyzed for the presence of polymorphisms using PolyPhred software(Nickerson DA 1997; Rieder MJ 1999). All the sequence traces of potential polymorphisms were visually inspected to confirm the presence of SNPs.

[0856] DNA sequences of PCR primers and sequencing primers used for SNP discovery are provided in Tables VIII and IX, respectfully.

[0857] Alternative methods for identifying SNPs of the present invention are known in the art. One such method involves resequencing of target sequences from individuals of diverse ethnic and geographic backgrounds by hybridization to probes immobilized to microfabricated arrays. The strategy and principles for the design and use of such arrays are generally described in WO 95/11995.

[0858] A typical probe array used in such as analysis would have two groups of four sets of probes that respectively tile both strands of a reference sequence. A first probe set comprises a plurality of probes exhibiting perfect complementarily with one of the reference sequences. Each probe in the first probe set has an interrogation position that corresponds to a nucleotide in the reference sequence. That is, the interrogation position is aligned with the corresponding nucleotide in the reference sequence, when the probe and reference sequence are aligned to maximize complementarily between the two. For each probe in the first set, there are three corresponding probes from three additional probe sets. Thus, there are four probes corresponding to each nucleotide in the reference sequence. The probes from the three additional probe sets would be identical to the corresponding probe from the first probe set except at the interrogation position, which occurs in the same position in each of the four corresponding probes from the four probe sets, and is occupied by a different nucleotide in the four probe sets. In the present analysis, probes were nucleotides long. Arrays tiled for multiple different references sequences were included on the same substrate.

[0859] Publicly available sequences for a given gene can be assembled into Gap4 (http://www.biozentrum.unibas.ch/-biocomp/staden/Overview.html). PCR primers covering each exon, could be designed, for example, using Primer 3 (httP://www-genome.wi.mit.edu/cgi-bin/primer/primer3.cgi). Primers would not be designed in regions where there are sequence discrepancies between reads. Genomic DNA could be amplified from at least two individuals using 2.5 pmol each primer, 1.5 mM MgCl2, 100 ˜M dNTPs, 0.75 ˜M AmpliTaq GOLD polymerase, and about 19 ng DNA in a 15 ul reaction. Reactions could be assembled using a PACKARD MultiPROBE robotic pipetting station and then put in MJ 96-well tetrad thermocyclers (96° C. for minutes, followed by cycles of 96° C. for seconds, 59° C. for 2 minutes, and 72° C. for 2 minutes). A subset of the PCR assays for each individual could then be run on 3% NuSieve gels in 0.5×TBE to confirm that the reaction worked.

[0860] For a given DNA, 5 ul (about 50 ng) of each PCR or RT-PCR product could be pooled (Final volume=150-200 ul). The products can be purified using QiaQuick PCR purification from Qiagen. The samples would then be eluted once in 35 ul sterile water and 4 ul lOX One-Phor-All buffer (Pharmacia). The pooled samples are then digested with 0.2 u DNaseI (Promega) for 10 minutes at 37° C. and then labeled with 0.5 nmols biotin-N6-ddATP and 15 u Terminal Transferase (GibcoBRL Life Technology) for 60 minutes at 37° C. Both fragmentation and labeling reactions could be terminated by incubating the pooled sample for 15 minutes at 100° C.

[0861] Low-density DNA chips {Affymetrix, Calif.) may be hybridized following the manufacturer's instructions. Briefly, the hybridization cocktail consisted of 3M TMACI, mM Tris pH 7.8, 0.01% Triton X-100, 100 mg/ml herring sperm DNA {Gibco BRL), 200 pM control biotin-labeled oligo. The processed PCR products are then denatured for 7 minutes at 100° C. and then added to prewarmed { 37° C.) hybridization solution. The chips are hybridized overnight at 44° C. Chips are washed in 1×SSPET and 6×SSPET followed by staining with 2 ug/ml SARPE and 0.5 mg/ml acetylated BSA in 200 ul of 6×SSPET for 8 minutes at room temperature. Chips are scanned using a Molecular Dynamics scanner.

[0862] Chip image files may be analyzed using Ulysses {Affymetrix, Calif.) which uses four algorithms to identify potential polymorphisms. Candidate polymorphisms may be visually inspected and assigned a confidence value: where high confidence candidates display all three genotypes, while likely candidates show only two genotypes {homozygous for reference sequence and heterozygous for reference and variant). Some of the candidate polymorphisms may be confirmed by ABI sequencing. Identified polymorphisms could then be compared to several databases to determine if they are novel.

### Example 2

### Method of Determining the Allele Frequency for Each SNP of the Present Invention

[0863] Allele frequencies of these polymorphisms may be determined by genotyping the Coriell DNA samples (Table VII; Coriell Institute, Collingswood, N.J.) using FP-TDI assay (Chen X 1999). The ethnicity and Coriell Sample IDs for each of the DNA samples utilized for the present invention are provided in Table VII. Automated genotyping calls may be made with an allele calling software developed by Joel Hirschorn (Whitehead Institute/MIT Center for Genome Research, personal communication).

[0864] Briefly, the no template controls (NTCs) are labeled accordingly in column C. The appropriate cells may be completed in column L indicating whether REF (homozygous ROX) or VAR (homozygous TAMRA) are expected to be rare genotypes (<10% of all samples)—the latter is important in helping the program to identify rare homozygotes. The number of 96 well plates genotyped in cell P2 are noted (generally between 0.5 and 4)—the program works best if this is accurate. No more than 384 samples can be analyzed at a time. The pairs of mP values from the LJL may be pasted into columns E and F; making sure there may be no residual data was left at the bottom fewer than 384 data points are provided. The DNA names may be provided in columns A, B or C; column I will be a concatenation of columns A, B and C. In addition, the well numbers for each sample may be also provided in column D.

[0865] With the above information provided, the program should automatically cluster the points and identify genotypes. The program works by converting the mP values into polar coordinates (distance from origin and angle from origin) with the angle being on a scale from 0 to 2; heterozygotes are placed as close to 1 as possible.

[0866] The cutoff values in columns L and M may be adjusted as desired.

[0867] Expert parameters: The most important parameters are the maximum angle for REF and minimum angle for VAR. These parameters may need to be changed in a particularly skewed assay which may be observed when an REF or VAR cluster is close to an angle of 1 and has called as a failed or HETs.

[0868] Other parameters are low and high cutoffs that are used to determine which points are considered for the determination of edges of the clusters. With small numbers of data points, the high cutoff may need to be increased (to 500 or so). This may be the right thing to do for every assay, but certainly when the program fails to identify a small cluster with high signal.

[0869] NTC TAMRA and ROX indicate the position of the no template control or failed samples as estimated by the computer algorithm.

[0870] No signal=mP< is the threshold below which points are automatically considered failures. “Throw out points with signal above” is the TAMRA or ROX mP value above which points are considered failures. The latter may occasionally need to be adjusted from 250 to 300, but caveat emptor for assays with signals >250. ‘Lump’ or ‘split’ describes a subtle difference in the way points are grouped into clusters. Lump generally is better. ‘HETs expected’ in the rare case where only homozygotes of either class are expected (e.g. a study of X chromosome SNPs in males), change this to “N”.

[0871] Notes on method of clustering: The origin is defined by the NTCs or other low signal points (the position of the origin is shown as “NTC TAMRA” and “NTC ROX”); the points with very low or high signal are not considered initially. The program finds the point farthest from the origin and calls that a HET; the ROX/TAMRA ratio is calculated from this point, placing the heterozygotes at 45 degrees from the origin (an angle of “1”). The angles from the origin are calculated (the scale ranges from 0 to 2) and used to define clusters. A histogram of angles is generated. The cluster boundaries are defined by an algorithm that takes into account the shape of the histogram. The homozygote clusters are defined as the leftmost and rightmost big clusters (unless the allele is specified as being rare, in which case the cluster need not be big). The heterozygote is the biggest cluster in between the REF and VAR. If there are two equal clusters, the one best-separated from REF and VAR is called HET. All other clusters are failed. Some fine tuning is applied to lump in scattered points on the edges of the clusters (if “Lump” is selected). The boundaries of the clusters are “Angles” in column L.

[0872] Once the clusters are defined, the interquartile distance of signal intensity is defined for each cluster. Points falling more than 3 or 4 interquartiles from the mean are excluded. (These are the “Signal cutoffs” in column M)

[0873] The invention encompasses additional methods of determining the allelic frequency of the SNPs of the present invention. Such methods may be known in the art, some of which are described elsewhere herein.

### Example 3

### Method of Genotyping Each SNP of the Present Invention

### a.) Genomic DNA Preparation

[0874] Genomic DNA samples for genotyping may be prepared using the Purigene™ DNA extraction kit from Gentra Systems (http://www.gentra.com). After preparation, DNA samples may be diluted to a 2 ng/ul working concentration with TE buffer (10 mM Tris-Cl, pH 8.0, 0.1 mM EDTA, pH 8.0) and stored in 1 ml 96 deep well plates (VWR) at −20 degrees until use.

[0875] Samples for genomic DNA preparation may be obtained from the Coriell tissues sources described herein, or from other sources known in the art or otherwise described herein.

### b) Genotyping

[0876] The SNP genotyping reaction may be performed using the SNPStream™ system (Orchid Biosience, Princeton, N.J.) based on genetic bit analysis (Nikiforov, T. et al, Nucleic Acids Res 22, 4167-4175 (1994)).

[0877] The regions including polymorphic sites are amplified by the polymerase chain reaction (PCR) using a pair of primers (OPERON Technologies), one of which was phosphorothioated. 6 ul PCR cocktail containing 1.0 ng/ul genomic DNA, 200 uM dNTPs, 0.5 uM forward PCR primer, 0.5 uM reverse PCR primer (phosphorothioated), 0.05 u/ul Platinum Taq DNA polymerase (LifeTechnologies), and 1.5 mM MgCl₂ The PCR reaction may be set up in 384-well plates (MJ Research) using a MiniTrak liquid handling station (Packard Bioscience). The PCR primer sequences may be selected from those provided in Table IX herein, or any other primer as may otherwise be required. PCR thermocycling may be performed under the following conditions in a MJ Research Tetrad machine: step 1, 95 degrees for 2 min; step 2, 94 degrees for 30 min; step 3, 55 degrees for 2 min; step 4, 72 degrees for 30 sec; step 5, go back to step 2 for an additional 39 cycles; step 6, 72 degrees for 1 min; and step 7, 12 degrees indefinitely)

[0878] After thermocycling, the amplified samples are placed in the SNPStream™ (Orchid Bioscience) machine, and automated genetic bit analysis (GBA) (Nikiforov, T. et al,supra) reaction is performed. The first step of this reaction is degradation of one of the strands of the PCR products by T7 gene 6 exonuclease to make them single-stranded. The strand containing phosphorothioated primer is resistant to T7 gene 6 nuclease, and is not degraded by this enzyme. After digestion, the single-stranded PCR products are subjected to an annealing step to the GBA primer on a solid phase, and then subjected to the GBA reaction (single base extension) using dideoxy-NTPs labeled with biotin or fluorescein. Incorporation of these dideoxynucleotides into a GBA primer is detected by two color ELISA assay using anti-fluorescein alkaline phosphatase conjugate and anti-biotin horseradish peroxidase. Automated genotype calls are made by GenoPak software (Orchid Bioscience), before manual correction of automated calls are done upon inspection of the resulting allelogram of each SNP.

### Example 4

### Alternative Method of Genotyping Each SNP of the Present Invention

[0879] In addition to the method of genotyping described in Example 3, the skilled artisan could determine the genotype of the polymorphisms of the present invention using the below described alternative method. This method is referred to as the “GBS method” herein and may be performed as described in conjunction with the teaches described elsewhere herein.

[0880] Briefly, the direct analysis of the sequence of the polymorphisms of the present invention can be accomplished by DNA sequencing of PCR products corresponding to the same. PCR amplicons are designed to be in close proximity to the polymorphisms of the present invention using the Primer3 program. The M13_SEQUENCE1 “TGTAAAACGACGGCCAGT (SEQ ID NO:611)” is prepended to each forward PCR primer (see Table VIII). The M13_SEQUENCE2 “CAGGAAACAGCTATGACC (SEQ ID NO: 612)” is prepended to each reverse PCR primer (see Table VIII). Preferred primers for this genotyping reaction are provided in Table X herein.

[0881] PCR amplification and purification are performed essentially the same as described in Example 1 herein.

[0882] PCR products are sequenced by the dye-terminator method using the M13_SEQUENCE1 and M13_SEQUENCE2 primers above. The genotype can be determined by analysis of the sequencing results at the polymorphic position.

### Example 5

### Statistical Analysis of the Association Between the Low Statin Response Phenotype and the SNPs of the Present Invention

[0883] The association between low statin efficacy responses and the single nucleotide polymorphisms of the present invention may be investigated by applying statistical analysis to the results of the genotyping assays described elsewhere herein. The central hypothesis of this analysis would be that a predisposition to develop such a phenotype may be conferred by specific genomic factors. The analysis would attempt to identify one or more of these factors in DNA samples from index cases and matched control subjects exposed to one or more statins, preferably, not not limited to, pravastatin (disclosed in U.S. Pat. No. 4,346,227), in addition to, or alternatively substituted with one or more of the following: lovastatin, simvastatin, fluvastatin, atorvastatin or cerivastatin.

### Methods

[0884] Measures. Single nucleotide polymorphisms (SNPs) in OATP2 and cMOAT gene regions are genotyped on all subjects essentially as described in Example 3 herein.

[0885] Statistical Analyses. Conditional logistic regression (HOSMER and LEMESHOW 2000) may be used to examine the associations between genotypes of the SNPs of the present invention and the development of low statin efficacy responses. All SNPs may be bi-allelic with three possible genotypes. For each SNP, in the overall sample and each subgroup, allele frequencies may be estimated. For consistency in SNP genotype parameter coding in the logistic regression models, the less frequent allele of each SNP may be designated as the rare allele and the number of copies of that allele that each subject carried, either 0, 1, or 2, may then be determined. Three possible genotypes for each SNP leaves two degrees of freedom for parameters in the conditional logistic regression model representing the information contained in these three genotype categories. Two dummy variables may be therefore created based on the copies of the rare allele for each subject for use in the conditional logistic regression model,

x₁=1 if copies of rare allele=1, 0 otherwise and

x₂=1 if copies of rare allele=2, 0 otherwise.

[0886] The full conditional logistic regression model used was

$${π}_{k} ( x ) = \frac{{ⅇ}^{{α}_{k} + {β}_{1}^{′} {x}_{1} + {β}_{2}^{′} {x}_{2}}}{1 + {ⅇ}^{{α}_{k} + {β}_{1}^{′} {x}_{1} + {β}_{2}^{′} {x}_{2}}} ,$$

[0887] where x in πₖ(x) is the vector of dummy variables representing the SNP genotypes described above, k is the matching stratum index specific to each matched case-control set of subjects, πₖ(x) is the matching stratum-specific expected probability that a subject is a case given x, αₖ is the matching stratum-specific contribution to πₖ(x) of all the matching variables constant within the kth stratum and each β′ represents the contribution of the respective dummy variable to πₖ(x).

[0888] For each SNP, the null hypothesis is that the vector of β′ are all equal to 0 and are tested using the scores test (HOSMER and LEMESHOW 2000). The degrees of freedom for the scores test statistic may be equal to one less than the number of genotypes. Exponentiation of each slope coefficient, β′, may be used to provide an estimate of the ratio of the odds of an adverse event (low statin efficacy response) in subjects carrying the specified copies of the rare allele represented in the definition of the coefficient, relative to controls matched for nationality, race, gender and starting dose, over the odds of such an adverse event for similarly matched subjects not carrying any copies of the rare allele. 95% confidence interval limits may be estimated for each odds ratio based on the standard error estimate of the respective slope coefficient.

### References

[0889] HOSMER, D. W., and S. LEMESHOW, 2000 Applied logistic regression. John Wiley & Sons, New York.

### Example 6

### Method of Isolating the Native Forms of the Organic Anion Transport and Multi-Drug Resistant Genes of the Present Invention

[0890] A number of methods have been described in the art that may be utilized in isolating the native forms of the organic anion transport and multi-drug resistant genes. Specific methods for each gene are referenced below and which are hereby incorporated by reference herein in their entireties. The artisan, skilled in the molecular biology arts, would be able to isolate these native forms based upon the methods and information contained, and/or referenced, therein.

### OATP2, Solute Carrier Family 21 Member 6 (HGNC_ID—SLC21A6; Genbank Accession No. —gi|6636521)

[0891] 1.) Hsiang, B. et al., J. Biol. Chem. 274 (52), 37161-37168 (1999) (hereby incorporated herein by reference in its entirety).

[0892] 2.) PCT International Publication No: WO0071566 (hereby incorporated herein by reference in its entirety).

### cMOAT, ATP-Binding Cassette Sub-Family C Member 2 (HGNC_ID—ABCC2; Genbank Accession No. —gi|6636521)

[0893] 1.) Taniguchi, K., Wada, M., Kohno, K., Nakamura, T., Kawabe, T., Kawakami, M., Kagotani, K., Okumura, K., Akiyama, S. and Kuwano, M. Cancer Res. 56 (18), 4124-4129 (1996)

[0894] 2.) Japanese Patent Application No.: JP10099079 (hereby incorporated herein by reference in its entirety).

### Example 7

### Method of Isolating the Novel Polymorphic Forms of the Organic Anion Transport and Multi-Drug Resistant Genes of the Present Invention

[0895] Since the novel allelic genes of the present invention represent genes present within at least a subset of the human population, these genes may be isolated using the methods provided in Example 3 above. For example, the source DNA used to isolate the novel allelic gene may be obtained through a random sampling of the human population and repeated until the allelic form of the gene is obtained. Preferably, random samples of source DNA from the human population are screened using the SNPs and methods of the present invention to identify those sources that comprise the allelic form of the gene. Once identified, such a source may be used to isolate the allelic form of the gene(s). The invention encompasses the isolation of such allelic genes from both genomic and/or cDNA libraries created from such source(s).

[0896] In reference to the specific methods provided in Example 3 above, it is expected that isolating the organic anion transport genes would be within the skill of an artisan trained in the molecular biology arts. Nonetheless, a detailed exemplary method of isolating at least one of the organic anion transporter genes, in this case the variant form (P155T) of OATP2, solute carrier family 21 member 6 cDNA (SNP_ID=PS100s2) is provided. Briefly,

[0897] First, the individuals with the P155T variation are identified by genotyping the genomic DNA samples using the FP-SBE (Chen X 1999) method, described in Example 1 and 2 above. DNA samples publicly available from the Coriell Institute (Collingswood, N.J.) are used (e.g., the Coriell Sample IDs provided in Table VII herein). Oligonucleotide primers that were used for this genotyping assay are as follows.

| | | | |
|---|---|---|---|
| OATP2.L: | 5′-1TCAGATGGACAAAAThFGCA-3′ | (PCR forward primer) | (SEQ ID NO:613) |
| OATP2.R: | 5′-AAAACACATGCTGGGAAATTG-3′ | (PCR reverse primer) | (SEQ ID NO:614) |
| OATP2: | 5′-cagtaatttatgtctttgtgggcc-3′ | (SBE primer) | (SEQ ID NO:615) |

[0898] By analyzing the genomic DNA samples (Coriell), individuals may be identified that harbor the P155T form of the OATP2receptor. Next, Lymphoblastoid cell lines from these individuals may be obtained from the Coriell Institute. These cells can be grown in RPMI-1640 medium with L-glutamine plus 10% FCS at 37 degrees. PolyA+RNA are then isolated from these cells using Oligotex Direct Kit (Life Technologies).

[0899] First strand cDNA (complementary DNA) is produced using Superscript Preamplification System for First Strand cDNA Synthesis (Life Technologies, Cat No 18089-011) using these polyA+RNA as templates, as specified in the users manual which is hereby incorporated herein by reference in its entirety. Specific cDNA encoding OATP2receptor is amplified by polymerase chain reaction (PCR) using a forward primer which hybridizes to the 5′-UTR region, a reverse primer which hybridizes to the 3′-UTR region, and these first strand cDNA as templates (Sambrook, Fritsch et al. 1989). For example, the primers specified in Tables VIII and IX may be used. Alternatively, these primers may be designed using Primer3 program (Rozen S 2000). Restriction enzyme sites (example: SalI for the forward primer, and NotI for reverse primer) are added to the 5′-end of these primer sequences to facilitate cloning into expression vectors after PCR amplification. PCR amplification may be performed essentially as described in the owner's manual of the Expand Long Template PCR System (Roche Molecular Biochemicals) following manufacturer's standard protocol, which is hereby incorporated herein by reference in its entirety.

[0900] PCR amplification products are digested with restriction enzymes (such as SalI and NotI, for example) and ligated with expression vector DNA cut with the same set of restriction enzymes. pSPORT (Invitrogen) is one example of such an expression vector. After ligated DNA is introduced into E. coli cells (Sambrook, Fritsch et al. 1989), plasmid DNA is isolated from these bacterial cells. This plasmid DNA is sequenced to confirm the presence an intact (full-length) coding region of the human OATP2 receptor with P155T variation using methods well known in the art and described elsewhere herein.

[0901] The skilled artisan would appreciate that the above metod may be applied to isolating the other novel polymorphic bradykinin associated genes of the present invention through the simple subsitution of applicable PCR and sequencing primers. Such primers may be selected from any one of the applicable primers provided in Tables VIII and/or IX, or may be designed using the Primer3 program (Rozen S 2000) as described. Such primers may preferably comprise at least a portion of any one of the polynucleotide sequences of the present invention.

### Example 8

### Method of Engineering the Novel Forms of the Organic Anion Transport and Multi-Drug Resistant Genes of the Present Invention

[0902] Aside from isolating the novel allelic genes of the present invention from DNA samples obtained from the human population and/or the Coriell Institute, as described in Example 4 above, the invention also encompasses methods of engineering the novel allelic genes of the present invention through the application of site-directed mutagenesis to the isolated native forms of the genes. Such methodology could be applied to synthesize allelic forms of the genes comprising at least one, or more, of the encoding SNPs of the present invention (e.g., silent, missense)—preferably at least 1, 2, 3, or 4 encoding SNPs for each gene.

[0903] In reference to the specific methods provided in Example 4 above, it is expected that isolating the novel polymorphic organic anion transport genes of the present invention would be within the skill of an artisan trained in the molecular biology arts. Nonetheless, a detailed exemplary method of engineering at least one of the organic anion transport genes to comprise the encoding and/or non-coding polymorphic nucleic acid sequence, in this case the variant form (P155T) of OATP2 cDNA (SNP_ID=PS100s2) is provided. Briefly,

[0904] cDNA clones encoding the human OATP2 may be identified by homology searches with the BLASTN program (Altschul S F 1990) against the Genbank non-redundant nucleotide sequence database using the published human OATP2 cDNA sequence (GenBank Accession No.:gi|6636521). Examples of publicly available human OATP2 cDNA clones discovered in this search may then be identified and obtained. After obtaining these clones, they are sequenced to confirm the validity of the DNA sequences. Alternatively, the OATP2 cDNA may be obtained by refering to the methods taught in the references for OATP2 provided herein.

[0905] Once these clones are confirmed to contain the intact wild type cDNA sequence of OATP2 coding region, the P155T polymorphism (mutation) may be introduced into the native sequence using PCR directed in vitro mutagenesis (Cormack 2000). In this method, synthetic oligonucleotides are designed to incorporate a point mutation at one end of an amplified fragment. Following PCR, the amplified fragments are made blunt-ended by treatment with Klenow Fragment.

[0906] These fragments are then ligated and subcloned into a vector to facilitate sequence analysis. This method consists of the following steps.

[0907] 1. Subcloning of cDNA insert into a high copy plasmid vector containing multiple cloning sites and M13 flanking sequences, such as pUC19 (Sambrook, Fritsch et al. 1989), in the forward orientation. The skilled artisan would appreciate that other plasmids could be equally substituted, and may be desirable in certain circumstances.

[0908] 2. Introduction of a mutation by PCR amplification of the cDNA region downstream of the mutation site using a primer including the mutation. (FIG. 8.5.2 in (Cormack 2000)). In the case of introducing the P155T mutation into the human OATP2 protein, the following two primers may be used.

M13 reverse sequencing primer:

(SEQ ID NO:616)

5′-AGCGGATAACAATTTCACACAGGA-3′.
Mutation primer:

(SEQ ID NO:617)

5′-pCAGAAAATTCAACATCAACCTTATCCAC-3′.

[0909] Mutation primer contains the mutation (P155T) at the 5′ end and its downstream flanking sequence. M13, reverse sequencing primer hybridizes to the pUC19 vector. Subcloned cDNA comprising the human OATP2 protein is used as a template (described in Step 1). A 100 ul PCR reaction mixture is prepared using 10 ng of the template DNA, 200 uM 4 dNTPs, 1 uM primers, 0.25 U Taq DNA polymerase (PE), and standard Taq DNA polymerase buffer. Typical PCR cycling condition are as follows:

| | |
|---|---|
| 20-25 cycles: | 45 sec, 93 degrees |
| | 2 min, 50 degrees |
| | 2 min, 72 degrees |
| 1 cycle: | 10 min, 72 degrees |

[0910] After the final extension step of PCR, 5 U Klenow Fragment is added and incubated for 15 min at 30 degrees. The PCR product is then digested with the restriction enzyme, EcoRI.

[0911] 3. PCR amplification of the upstream region is then performed, using subcloned cDNA as a template (the product of Step 1). This PCR is done using the following two primers:

M13 forward sequencing primer:

(SEQ ID NO:618)

5′-CGCCAGGGTTTTCCCAGTCACGAC-3′.
Flanking primer:

(SEQ ID NO:619)

5′-pGTCTTTTAAGTTGTAGTTGGAATAGGTG-3′.

[0912] Flanking primer is complimentary to the upstream flanking sequence of the P155T mutation. M13 forward sequencing primer hybridizes to the pUC19 vector. PCR conditions and Klenow treatments follow the same procedures as provided in Step 2, above. The PCR product is then digested with the restriction enzyme, HindIII.

[0913] 4. Prepare the pUC19 vector for cloning the cDNA comprising the polymorphic site. Digest pUC19 plasmid DNA with EcoRI and HindII. The resulting digested vector fragment may then be purified using techniques well known in the art, such as gel purification, for example.

[0914] 5. Combine the products from Step 2 (PCR product containing mutation), Step 3 (PCR product containing the upstream region), and Step 4 (digested vector), and ligate them together using standard blunt-end ligation conditions (Sambrook, Fritsch et al. 1989).

[0915] 6. Transform the resulting recombinant plasmid from Step 5 into E.coli competent cells using methods known in the art, such as, for example, the transformation methods described in Sambrook, Fritsch et al. 1989.

[0916] 7. Analyze the amplified fragment portion of the plasmid DNA by DNA sequencing to confirm the point mutation, and absence of any other mutations introduced during PCR. The method of sequencing the insert DNA, including the primers utilized, are described herein or are otherwise known in the art.

[0917] The skilled artisan would appreciate that the above method may be applied to engineering the other novel polymorphic bradykinin associated genes of the present invention through the simple subsitution of applicable mutation, flanking, PCR, and sequencing primers for each specific gene and/or polymorphism. Some of these primers may be selected from any one of the applicable primers provided in Tables VIII and/or IX, may be designed using the Primer3 program (Rozen S 2000), or designed manually, as described. Such primers may preferably comprise at least a portion of any one of the polynucleotide sequences of the present invention.

[0918] Moreover, the skilled artisan would appreciate that the above method may be applied to engineering more than one polymorphic nucleic acid sequence of the present invention into the novel polymorphic organic anion transport genes of the present invention. For example, the OATP2 cDNA could be engineered to comprise the D130Y encoding polymorphism (SNP_ID:AE103s1), or the T129C encoding polymorphism (SNP_ID: PS100s9), or engineered to comprise both the D130Y and P155T polymorphisms. Such an engineered gene could be created through succesive rounds of site-directed mutagenesis, as described in Steps 1 thru 7 above, or consolidated into a single round of mutagenesis. For example, Step 2 above could be performed for each mutation, then the products of both mutation amplifications could be combined with the product of Step 3 and 4, and the procedure followed as described.

### Example 9

### Alternative Methods of Detecting Polymorphisms Encompassed by the Present Invention

### A. Preparation of Samples

[0919] Polymorphisms are detected in a target nucleic acid from an individual being analyzed. For assay of genomic DNA, virtually any biological sample (other than pure red blood cells) is suitable. For example, convenient tissue samples include whole blood, semen, saliva, tears, urine, fecal material, sweat, buccal, skin and hair. For assay of cDNA or mRNA, the tissue sample must be obtained from an organ in which the target nucleic acid is expressed. For example, if the target nucleic acid is a cytochrome P450, the liver is a suitable source.

[0920] Many of the methods described below require amplification of DNA from target samples. This can be accomplished by e.g., PCR. See generally PCR Technology: Principles and Applications for DNA Amplification (ed. H. A. Erlich, Freeman Press, NY, N.Y., 1992); PCR Protocols: A Guide to Methods and Applications (eds. Innis, et al., Academic Press, San Diego, Calif., 1990); Mattila et al., Nucleic Acids Res. 19, 4967 (1991); Eckert et al., PCR Methods and Applications 1, (1991); PCR (eds. McPherson et al., IRL Press, Oxford); and U.S. Pat. No. 4,683,202.

[0921] Other suitable amplification methods include the ligase chain reaction (LCR) (see Wu and Wallace, Genomics 4:560 (1989), Landegren et al., Science 241:1077 (1988), transcription amplification (Kwoh et al., Proc. Natl. Acad. Sci. USA 86, 1173 (1989), and self-sustained sequence replication (Guatelli et al., Proc. Nat. Acad. Sci. USA, 87:1874 (1990)) and nucleic acid based sequence amplification (NASBA). The latter two amplification methods involve isothermal reactions based on isothermal transcription, which produce both single stranded RNA (ssRNA) and double stranded DNA (dsDNA) as the amplification products in a ratio of about 30 or 100 to 1, respectively.

[0922] Additional methods of amplification are known in the art or are described elsewhere herein.

### B. Detection of Polymorphisms in Target DNA

[0923] There are two distinct types of analysis of target DNA for detecting polymorphisms. The first type of analysis, sometimes referred to as de novo characterization, is carried out to identify polymorphic sites not previously characterized (i.e., to identify new polymorphisms). This analysis compares target sequences in different individuals to identify points of variation, i.e., polymorphic sites. By analyzing groups of individuals representing the greatest ethnic diversity among humans and greatest breed and species variety in plants and animals, patterns characteristic of the most common alleles/haplotypes of the locus can be identified, and the frequencies of such alleles/haplotypes in the population can be determined. Additional allelic frequencies can be determined for subpopulations characterized by criteria such as geography, race, or gender. The de novo identification of polymorphisms of the invention is described in the Examples section.

[0924] The second type of analysis determines which form(s) of a characterized (known) polymorphism are present in individuals under test. Additional methods of analysis are known in the art or are described elsewhere herein.

### 1. Allele-Specific Probes

[0925] The design and use of allele-specific probes for analyzing polymorphisms is described by e.g., Saiki et al., Nature 324,163-166 (1986); Dattagupta, EP 235,726, Saiki, WO 89/11548. Allele-specific probes can be designed that hybridize to a segment of target DNA from one individual but do not hybridize to the corresponding segment from another individual due to the presence of different polymorphic forms in the respective segments from the two individuals. Hybridization conditions should be sufficiently stringent that there is a significant difference in hybridization intensity between alleles, and preferably an essentially binary response, whereby a probe hybridizes to only one of the alleles. Some probes are designed to hybridize to a segment of target DNA such that the polymorphic site aligns with a central position (e.g., in a 15-mer at the 7 position; in a 16-mer, at either the 8 or 9 position) of the probe. This design of probe achieves good discrimination in hybridization between different allelic forms.

[0926] Allele-specific probes are often used in pairs, one member of a pair showing a perfect match to a reference form of a target sequence and the other member showing a perfect match to a variant form. Several pairs of probes can then be immobilized on the same support for simultaneous analysis of multiple polymorphisms within the same target sequence.

### 2. Tiling Arrays

[0927] The polymorphisms can also be identified by hybridization to nucleic acid arrays, some examples of which are described in WO 95/11995. The same arrays or different arrays can be used for analysis of characterized polymorphisms. WO 95/11995 also describes sub arrays that are optimized for detection of a variant form of a precharacterized polymorphism. Such a sub array contains probes designed to be complementary to a second reference sequence, which is an allelic variant of the first reference sequence. The second group of probes is designed by the same principles as described, except that the probes exhibit complementarity to the second reference sequence. The inclusion of a second group (or further groups) can be particularly useful for analyzing short subsequences of the primary reference sequence in which multiple mutations are expected to occur within a short distance commensurate with the length of the probes (e.g., two or more mutations within 9 to bases).

### 3. Allele-Specific Primers

[0928] An allele-specific primer hybridizes to a site on target DNA overlapping a polymorphism and only primes amplification of an allelic form to which the primer exhibits perfect complementarity. See Gibbs, Nucleic Acid Res. 17,2427-2448 (1989). This primer is used in conjunction with a second primer which hybridizes at a distal site. Amplification proceeds from the two primers, resulting in a detectable product which indicates the particular allelic form is present. A control is usually performed with a second pair of primers, one of which shows a single base mismatch at the polymorphic site and the other of which exhibits perfect complementarity to a distal site. The single-base mismatch prevents amplification and no detectable product is formed. The method works best when the mismatch is included in the 3′-most position of the oligonucleotide aligned with the polymorphism because this position is most destabilizing elongation from the primer (see, e.g., WO 93/22456).

### 4. Direct-Sequencing

[0929] The direct analysis of the sequence of polymorphisms of the present invention can be accomplished using either the dideoxy chain termination method or the Maxam-Gilbert method (see Sambrook et al., Molecular Cloning, A Laboratory Manual (2nd Ed., CSHP, New York 1989); Zyskind et al., Recombinant DNA Laboratory Manual, (Acad. Press, 1988)).

### 5. Denaturing Gradient Gel Electrophoresis

[0930] Amplification products generated using the polymerase chain reaction can be analyzed by the use of denaturing gradient gel electrophoresis. Different alleles can be identified based on the different sequence-dependent melting properties and electrophoretic migration of DNA in solution. Erlich, ed., PCR Technology. Principles and Applications for DNA Amplification, (W. H. Freeman and Co, New York, 1992), Chapter 7.

### 6. Single-Strand Conformation Polymorphism Analysis

[0931] Alleles of target sequences can be differentiated using single-strand conformation polymorphism analysis, which identifies base differences by alteration in electrophoretic migration of single stranded PCR products, as described in Orita et al., Proc. Nat. Acad. Sci. 86,2766-2770 (1989). Amplified PCR products can be generated as described above, and heated or otherwise denatured, to form single stranded amplification products. Single-stranded nucleic acids may refold or form secondary structures which are partially dependent on the base sequence. The different electrophoretic mobilities of single-stranded amplification products can be related to base-sequence differences between alleles of target sequences.

### 7. Single Base Extension

[0932] An alternative method for identifying and analyzing polymorphisms is based on single-base extension (SBE) of a fluorescently-labeled primer coupled with fluorescence resonance energy transfer (FRET) between the label of the added base and the label of the primer. Typically, the method, such as that described by Chen et al., (PNAS 94:10756-61 (1997), uses a locus-specific oligonucleotide primer labeled on the 5′ terminus with 5-carboxyfluorescein (FAM). This labeled primer is designed so that the 3′ end is immediately adjacent to the polymorphic site of interest. The labeled primer is hybridized to the locus, and single base extension of the labeled primer is performed with fluorescently-labeled dideoxyribonucleotides (ddNTPs) in dye-terminator sequencing fashion. An increase in fluorescence of the added ddNTP in response to excitation at the wavelength of the labeled primer is used to infer the identity of the added nucleotide.

### Example 10

### Method of Assessing the Ability of the Novel Organic Anion Transport and Multi-Drug Resistant Proteins of the Present Invention to Serve as Organic Anion Transportors

[0933] The activity of the the novel organic anion transport polypeptides of the present invention, specifically the OATP2 allelic variants of the present invention, may be measured using an assay using a variety of assays known in the art for organic anion transporters, but preferably the assay provided in PCT International Publication No. WO0071566. OF particular importance would be to test each variants ability to transport pravastatin, DHEAS, and taurocholate relative to the wild-type OATP2 protein. Briefly, 293c18 cells, an HEK293 derivative, are transiently transfected with the OATP2 expression vector pCEPOATP2, or the pCEP4 vector alone (MOCK) and the transport of [³H]-labeled substrates is determined 24 hours later. Specific uptake of [³H]-pravastatin and [³H]-DHEAS, and [³H]-taurocholate may then be observed in cells transfected with OATP2 but not in the mock transfected cells.

### Example 11

### Bacterial Expression of a Polypeptide

[0934] A polynucleotide encoding a polypeptide of the present invention is amplified using PCR oligonucleotide primers corresponding to the 5′ and 3′ ends of the DNA sequence, as outlined in the Examples above or otherwise known in the art, to synthesize insertion fragments. The primers used to amplify the cDNA insert should preferably contain restriction sites, such as BamHI and XbaI, at the 5′ end of the primers in order to clone the amplified product into the expression vector. For example, BamHI and XbaI correspond to the restriction enzyme sites on the bacterial expression vector pQE-9. (Qiagen, Inc., Chatsworth, Calif.). This plasmid vector encodes antibiotic resistance (Ampr), a bacterial origin of replication (ori), an IPTG-regulatable promoter/operator (P/O), a ribosome binding site (RBS), a 6-histidine tag (6-His), and restriction enzyme cloning sites.

[0935] The pQE-9 vector is digested with BamHI and XbaI and the amplified fragment is ligated into the pQE-9 vector maintaining the reading frame initiated at the bacterial RBS. The ligation mixture is then used to transform the E. coli strain M15/rep4 (Qiagen, Inc.) which contains multiple copies of the plasmid pREP4, that expresses the lacI repressor and also confers kanamycin resistance (Kanr). Transformants are identified by their ability to grow on LB plates and ampicillin/kanamycin resistant colonies are selected. Plasmid DNA is isolated and confirmed by restriction analysis.

[0936] Clones containing the desired constructs are grown overnight (O/N) in liquid culture in LB media supplemented with both Amp (100 ug/ml) and Kan (25 ug/ml). The O/N culture is used to inoculate a large culture at a ratio of 1:100 to 1:250. The cells are grown to an optical density 600 (O.D.600) of between 0.4 and 0.6. IPTG (Isopropyl-B-D-thiogalacto pyranoside) is then added to a final concentration of 1 mM. IPTG induces by inactivating the lacd repressor, clearing the P/O leading to increased gene expression.

[0937] Cells are grown for an extra 3 to 4 hours. Cells are then harvested by centrifugation (20 mins at 6000×g). The cell pellet is solubilized in the chaotropic agent 6 Molar Guanidine HCl by stirring for 3-4 hours at 4 degree C. The cell debris is removed by centrifugation, and the supernatant containing the polypeptide is loaded onto a nickel-nitrilo-tri-acetic acid (“Ni-NTA”) affinity resin column (available from QIAGEN, Inc., supra). Proteins with a 6×His tag bind to the Ni-NTA resin with high affinity and can be purified in a simple one-step procedure (for details see: The QIAexpressionist (1995) QIAGEN, Inc., supra).

[0938] Briefly, the supernatant is loaded onto the column in 6 M guanidine-HCl, pH 8, the column is first washed with 10 volumes of 6 M guanidine-HCl, pH 8, then washed with 10 volumes of 6 M guanidine-HCl pH 6, and finally the polypeptide is eluted with 6 M guanidine-HCl, pH 5.

[0939] The purified protein is then renatured by dialyzing it against phosphate-buffered saline (PBS) or 50 mM Na-acetate, pH 6 buffer plus 200 mM NaCl. Alternatively, the protein can be successfully refolded while immobilized on the Ni-NTA column. The recommended conditions are as follows: renature using a linear 6M-1M urea gradient in 500 mM NaCl, 20% glycerol, 20 mM Tris/HCl pH 7.4, containing protease inhibitors. The renaturation should be performed over a period of 1.5 hours or more. After renaturation the proteins are eluted by the addition of 250 mM imidazole. Imidazole is removed by a final dialyzing step against PBS or 50 mM sodium acetate pH 6 buffer plus 200 mM NaCl. The purified protein is stored at 4 degree C or frozen at −80 degree C.

### Example 12

### Purification of a Polypeptide from an Inclusion Body

[0940] The following alternative method can be used to purify a polypeptide expressed in E coli when it is present in the form of inclusion bodies. Unless otherwise specified, all of the following steps are conducted at 4-10 degree C.

[0941] Upon completion of the production phase of the E. coli fermentation, the cell culture is cooled to 4-10 degree C and the cells harvested by continuous centrifugation at 15,000 rpm (Heraeus Sepatech). On the basis of the expected yield of protein per unit weight of cell paste and the amount of purified protein required, an appropriate amount of cell paste, by weight, is suspended in a buffer solution containing 100 mM Tris, 50 mM EDTA, pH 7.4. The cells are dispersed to a homogeneous suspension using a high shear mixer.

[0942] The cells are then lysed by passing the solution through a microfluidizer (Microfluidics, Corp. or APV Gaulin, Inc.) twice at 4000-6000 psi. The homogenate is then mixed with NaCl solution to a final concentration of 0.5 M NaCl, followed by centrifugation at 7000×g for 15 min. The resultant pellet is washed again using 0.5M NaCl, 100 mM Tris, 50 mM EDTA, pH 7.4.

[0943] The resulting washed inclusion bodies are solubilized with 1.5 M guanidine hydrochloride (GuHCl) for 2-4 hours. After 7000×g centrifugation for 15 min., the pellet is discarded and the polypeptide containing supernatant is incubated at 4 degree C overnight to allow further GuHCl extraction.

[0944] Following high speed centrifugation (30,000×g) to remove insoluble particles, the GuHCl solubilized protein is refolded by quickly mixing the GuHCl extract with 20 volumes of buffer containing 50 mM sodium, pH 4.5, 150 mM NaCl, 2 mM EDTA by vigorous stirring. The refolded diluted protein solution is kept at 4 degree C without mixing for 12 hours prior to further purification steps.

[0945] To clarify the refolded polypeptide solution, a previously prepared tangential filtration unit equipped with 0.16 um membrane filter with appropriate surface area (e.g., Filtron), equilibrated with 40 mM sodium acetate, pH 6.0 is employed. The filtered sample is loaded onto a cation exchange resin (e.g., Poros HS-50, Perceptive Biosystems). The column is washed with 40 mM sodium acetate, pH 6.0 and eluted with 250 mM, 500 mM, 1000 mM, and 1500 mM NaCl in the same buffer, in a stepwise manner. The absorbance at 280 nm of the effluent is continuously monitored. Fractions are collected and further analyzed by SDS-PAGE.

[0946] Fractions containing the polypeptide are then pooled and mixed with 4 volumes of water. The diluted sample is then loaded onto a previously prepared set of tandem columns of strong anion (Poros HQ-50, Perceptive Biosystems) and weak anion (Poros CM-20, Perceptive Biosystems) exchange resins. The columns are equilibrated with 40 mM sodium acetate, pH 6.0. Both columns are washed with 40 mM sodium acetate, pH 6.0, 200 mM NaCl. The CM-20 column is then eluted using a 10 column volume linear gradient ranging from 0.2 M NaCl, 50 mM sodium acetate, pH 6.0 to 1.0 M NaCl, 50 mM sodium acetate, pH 6.5. Fractions are collected under constant A280 monitoring of the effluent. Fractions containing the polypeptide (determined, for instance, by 16% SDS-PAGE) are then pooled.

[0947] The resultant polypeptide should exhibit greater than 95% purity after the above refolding and purification steps. No major contaminant bands should be observed from Coomassie blue stained 16% SDS-PAGE gel when 5 ug of purified protein is loaded. The purified protein can also be tested for endotoxin/LPS contamination, and typically the LPS content is less than 0.1 ng/ml according to LAL assays.

### Example 13

### Cloning and Expression of a Polypeptide in a Baculovirus Expression System

[0948] In this example, the plasmid shuttle vector pAc373 is used to insert a polynucleotide into a baculovirus to express a polypeptide. A typical baculovirus expression vector contains the strong polyhedrin promoter of the Autographa californica nuclear polyhedrosis virus (AcMNPV) followed by convenient restriction sites, which may include, for example BamHI, Xba I and Asp718. The polyadenylation site of the simian virus 40 (“SV40”) is often used for efficient polyadenylation. For easy selection of recombinant virus, the plasmid contains the beta-galactosidase gene from E. coli under control of a weak Drosophila promoter in the same orientation, followed by the polyadenylation signal of the polyhedrin gene. The inserted genes are flanked on both sides by viral sequences for cell-mediated homologous recombination with wild-type viral DNA to generate a viable virus that express the cloned polynucleotide.

[0949] Many other baculovirus vectors can be used in place of the vector above, such as pVL941 and pAcIM1, as one skilled in the art would readily appreciate, as long as the construct provides appropriately located signals for transcription, translation, secretion and the like, including a signal peptide and an in-frame AUG as required. Such vectors are described, for instance, in Luckow et al., Virology 170:31-39 (1989).

[0950] A polynucleotide encoding a polypeptide of the present invention is amplified using PCR oligonucleotide primers corresponding to the 5′ and 3′ ends of the DNA sequence, as outlined in the Examples above or otherwise known in the art, to synthesize insertion fragments. The primers used to amplify the cDNA insert should preferably contain restriction sites at the 5′ end of the primers in order to clone the amplified product into the expression vector. Specifically, the cDNA sequence contained in the deposited clone, including the AUG initiation codon and the naturally associated leader sequence identified elsewhere herein (if applicable), is amplified using the PCR protocol described herein. If the naturally occurring signal sequence is used to produce the protein, the vector used does not need a second signal peptide. Alternatively, the vector can be modified to include a baculovirus leader sequence, using the standard methods described in Summers et al., “A Manual of Methods for Baculovirus Vectors and Insect Cell Culture Procedures” Texas Agricultural Experimental Station Bulletin No. 1555 (1987).

[0951] The amplified fragment is isolated from a 1% agarose gel using a commercially available kit (“Geneclean” BIO 101 Inc., La Jolla, Calif.). The fragment then is digested with appropriate restriction enzymes and again purified on a 1% agarose gel.

[0952] The plasmid is digested with the corresponding restriction enzymes and optionally, can be dephosphorylated using calf intestinal phosphatase, using routine procedures known in the art. The DNA is then isolated from a 1% agarose gel using a commercially available kit (“Geneclean” BIO 101 Inc., La Jolla, Calif.).

[0953] The fragment and the dephosphorylated plasmid are ligated together with T4 DNA ligase. E. coli HB101 or other suitable E. coli hosts such as XL-1 Blue (Stratagene Cloning Systems, La Jolla, Calif.) cells are transformed with the ligation mixture and spread on culture plates. Bacteria containing the plasmid are identified by digesting DNA from individual colonies and analyzing the digestion product by gel electrophoresis. The sequence of the cloned fragment is confirmed by DNA sequencing.

[0954] Five ug of a plasmid containing the polynucleotide is co-transformed with 1.0 ug of a commercially available linearized baculovirus DNA (“BaculoGoldtm baculovirus DNA”, Pharmingen, San Diego, Calif.), using the lipofection method described by Felgner et al., Proc. Natl. Acad. Sci. USA 84:7413-7417 (1987). One ug of BaculoGoldtm virus DNA and 5 ug of the plasmid are mixed in a sterile well of a microtiter plate containing 50 ul of serum-free Grace's medium (Life Technologies Inc., Gaithersburg, Md.). Afterwards, 10 ul Lipofectin plus 90 ul Grace's medium are added, mixed and incubated for 15 minutes at room temperature. Then the transfection mixture is added drop-wise to Sf9 insect cells (ATCC CRL 1711) seeded in a 35 mm tissue culture plate with 1 ml Grace's medium without serum. The plate is then incubated for 5 hours at 27 degrees C. The transfection solution is then removed from the plate and 1 ml of Grace's insect medium supplemented with 10% fetal calf serum is added. Cultivation is then continued at 27 degrees C for four days.

[0955] After four days the supernatant is collected and a plaque assay is performed, as described by Summers and Smith, supra. An agarose gel with “Blue Gal” (Life Technologies Inc., Gaithersburg) is used to allow easy identification and isolation of gal-expressing clones, which produce blue-stained plaques. (A detailed description of a “plaque assay” of this type can also be found in the user's guide for insect cell culture and baculovirology distributed by Life Technologies Inc., Gaithersburg, page 9-10.) After appropriate incubation, blue stained plaques are picked with the tip of a micropipettor (e.g., Eppendorf). The agar containing the recombinant viruses is then resuspended in a microcentrifuge tube containing 200 ul of Grace's medium and the suspension containing the recombinant baculovirus is used to infect Sf9 cells seeded in 35 mm dishes. Four days later the supernatants of these culture dishes are harvested and then they are stored at 4 degree C.

[0956] To verify the expression of the polypeptide, Sf9 cells are grown in Grace's medium supplemented with 10% heat-inactivated FBS. The cells are infected with the recombinant baculovirus containing the polynucleotide at a multiplicity of infection (“MOI”) of about 2. If radiolabeled proteins are desired, 6 hours later the medium is removed and is replaced with SF900 II medium minus methionine and cysteine (available from Life Technologies Inc., Rockville, Md.). After 42 hours, 5 uCi of 35S-methionine and 5 uCi 35S-cysteine (available from Amersham) are added. The cells are further incubated for 16 hours and then are harvested by centrifugation. The proteins in the supernatant as well as the intracellular proteins are analyzed by SDS-PAGE followed by autoradiography (if radiolabeled).

[0957] Microsequencing of the amino acid sequence of the amino terminus of purified protein may be used to determine the amino terminal sequence of the produced protein.

### Example 14

### Expression of a Polypeptide in Mammalian Cells

[0958] The polypeptide of the present invention can be expressed in a mammalian cell. A typical mammalian expression vector contains a promoter element, which mediates the initiation of transcription of mRNA, a protein coding sequence, and signals required for the termination of transcription and polyadenylation of the transcript. Additional elements include enhancers, Kozak sequences and intervening sequences flanked by donor and acceptor sites for RNA splicing. Highly efficient transcription is achieved with the early and late promoters from SV40, the long terminal repeats (LTRs) from Retroviruses, e.g., RSV, HTLVI, HIVI and the early promoter of the cytomegalovirus (CMV). However, cellular elements can also be used (e.g., the human actin promoter).

[0959] Suitable expression vectors for use in practicing the present invention include, for example, vectors such as pSVL and pMSG (Pharmacia, Uppsala, Sweden), pRSVcat (ATCC 37152), pSV2dhfr (ATCC 37146), pBC12MI (ATCC 67109), pCMVSport 2.0, and pCMVSport 3.0. Mammalian host cells that could be used include, human Hela, 293, H9 and Jurkat cells, mouse NIH3T3 and C127 cells, Cos 1, Cos 7 and CV1, quail QC1-3 cells, mouse L cells and Chinese hamster ovary (CHO) cells.

[0960] Alternatively, the polypeptide can be expressed in stable cell lines containing the polynucleotide integrated into a chromosome. The co-transformation with a selectable marker such as dhfr, gpt, neomycin, hygromycin allows the identification and isolation of the transformed cells.

[0961] The transformed gene can also be amplified to express large amounts of the encoded protein. The DHFR (dihydrofolate reductase) marker is useful in developing cell lines that carry several hundred or even several thousand copies of the gene of interest. (See, e.g., Alt, F. W., et al., J. Biol. Chem. 253:1357-1370 (1978); Hamlin, J. L. and Ma, C., Biochem. et Biophys. Acta, 1097:107-143 (1990); Page, M. J. and Sydenham, M. A., Biotechnology 9:64-68 (1991).) Another useful selection marker is the enzyme glutamine synthase (GS) (Murphy et al., Biochem J. 227:277-279 (1991); Bebbington et al., Bio/Technology 10:169-175 (1992). Using these markers, the mammalian cells are grown in selective medium and the cells with the highest resistance are selected. These cell lines contain the amplified gene(s) integrated into a chromosome. Chinese hamster ovary (CHO) and NSO cells are often used for the production of proteins.

[0962] A polynucleotide of the present invention is amplified according to the protocol outlined in herein. If the naturally occurring signal sequence is used to produce the protein, the vector does not need a second signal peptide. Alternatively, if the naturally occurring signal sequence is not used, the vector can be modified to include a heterologous signal sequence. (See, e.g., WO 96/34891.) The amplified fragment is isolated from a 1% agarose gel using a commercially available kit (“Geneclean” BIO 101 Inc., La Jolla, Calif.). The fragment then is digested with appropriate restriction enzymes and again purified on a 1% agarose gel.

[0963] The amplified fragment is then digested with the same restriction enzyme and purified on a 1% agarose gel. The isolated fragment and the dephosphorylated vector are then ligated with T4 DNA ligase. E. coli HB101 or XL-1 Blue cells are then transformed and bacteria are identified that contain the fragment inserted into plasmid pC6 using, for instance, restriction enzyme analysis.

[0964] Chinese hamster ovary cells lacking an active DHFR gene is used for transformation. Five μg of an expression plasmid is cotransformed with 0.5 ug of the plasmid pSVneo using lipofectin (Felgner et al., supra). The plasmid pSV2-neo contains a dominant selectable marker, the neo gene from Tn5 encoding an enzyme that confers resistance to a group of antibiotics including G418. The cells are seeded in alpha minus MEM supplemented with 1 mg/ml G418. After 2 days, the cells are trypsinized and seeded in hybridoma cloning plates (Greiner, Germany) in alpha minus MEM supplemented with 10, 25, or 50 ng/ml of methotrexate plus 1 mg/ml G418. After about 10-14 days single clones are trypsinized and then seeded in 6-well petri dishes or 10 ml flasks using different concentrations of methotrexate (50 nM, 100 nM, 200 nM, 400 nM, 800 nM). Clones growing at the highest concentrations of methotrexate are then transferred to new 6-well plates containing even higher concentrations of methotrexate (1 uM, 2 uM, 5 uM, 10 mM, 20 mM). The same procedure is repeated until clones are obtained which grow at a concentration of 100 -200 uM. Expression of the desired gene product is analyzed, for instance, by SDS-PAGE and Western blot or by reversed phase HPLC analysis.

### Example 15

### Protein Fusions

[0965] The polypeptides of the present invention are preferably fused to other proteins. These fusion proteins can be used for a variety of applications. For example, fusion of the present polypeptides to His-tag, HA-tag, protein A, IgG domains, and maltose binding protein facilitates purification. (See Example described herein; see also EP A 394,827; Traunecker, et al., Nature 331:84-86 (1988).) Similarly, fusion to IgG-1, IgG-3, and albumin increases the half-life time in vivo. Nuclear localization signals fused to the polypeptides of the present invention can target the protein to a specific subcellular localization, while covalent heterodimer or homodimers can increase or decrease the activity of a fusion protein. Fusion proteins can also create chimeric molecules having more than one function. Finally, fusion proteins can increase solubility and/or stability of the fused protein compared to the non-fused protein. All of the types of fusion proteins described above can be made by modifying the following protocol, which outlines the fusion of a polypeptide to an IgG molecule.

[0966] Briefly, the human Fc portion of the IgG molecule can be PCR amplified, using primers that span the 5′ and 3′ ends of the sequence described below. These primers also should have convenient restriction enzyme sites that will facilitate cloning into an expression vector, preferably a mammalian expression vector. Note that the polynucleotide is cloned without a stop codon, otherwise a fusion protein will not be produced.

[0967] The naturally occurring signal sequence may be used to produce the protein (if applicable). Alternatively, if the naturally occurring signal sequence is not used, the vector can be modified to include a heterologous signal sequence. (See, e.g., WO 96/34891 and/or U.S. Pat. No. 6,066,781, supra.)

[0968] Human IgG Fc region:

(SEQ ID NO:606)

GGGATCCGGAGCCCAAATCTTCTGACAAAACTCACACATGCCCACCGTGC
CCAGCACCTGAATTCGAGGGTGCACCGTCAGTCTTCCTCTTCCCCCCAAA
ACCCAAGGACACCCTCATGATCTCCCGGACTCCTGAGGTCACATGCGTGG
TGGTGGACGTAAGCCACGAAGACCCTGAGGTCAAGTTCAACTGGTACGTG
GACGGCGTGGAGGTGCATAATGCCAAGACAAAGCCGCGGGAGGAGCAGTA
CAACAGCACGTACCGTGTGGTCAGCGTCCTCACCGTCCTGCACCAGGACT
GGCTGAATGGCAAGGAGTACAAGTGCAAGGTCTCCAACAAAGCCCTCCCA
ACCCCCATCGAGAAAACCATCTCCAAAGCCAAAGGGCAGCCCCGAGAACC
ACAGGTGTACACCCTGCCCCCATCCCGGGATGAGCTGACCAAGAACCAGG
TCAGCCTGACCTGCCTGGTCAAAGGCTTCTATCCAAGCGACATCGCCGTG
GAGTGGGAGAGCAATGGGCAGCCGGAGAACAACTACAAGACCACGCCTCC
CGTGCTGGACTCCGACGGCTCCTTCTTCCTCTACAGCAAGCTCACCGTGG
ACAAGAGCAGGTGGCAGCAGGGGAACGTCTTCTCATGCTCCGTGATGCAT
GAGGCTCTGCACAACCACTACACGCAGAAGAGCCTCTCCCTGTCTCCGGG
TAAATGAGTCCGACGGCCGCGACTCTAGAGGAT

### Example 16

### Production of an Antibody from a Polypeptide

[0969] The antibodies of the present invention can be prepared by a variety of methods. (See, Current Protocols, Chapter 2.) As one example of such methods, cells expressing a polypeptide of the present invention are administered to an animal to induce the production of sera containing polyclonal antibodies. In a preferred method, a preparation of the protein is prepared and purified to render it substantially free of natural contaminants. Such a preparation is then introduced into an animal in order to produce polyclonal antisera of greater specific activity.

[0970] In the most preferred method, the antibodies of the present invention are monoclonal antibodies (or protein binding fragments thereof). Such monoclonal antibodies can be prepared using hybridoma technology. (Kohler et al., Nature 256:495 (1975); Kohler et al., Eur. J. Immunol. 6:511 (1976); Kohler et al., Eur. J. Immunol. 6:292 (1976); Hammerling et al., in: Monoclonal Antibodies and T-Cell Hybridomas, Elsevier, N.Y., pp. 563-681 (1981).) In general, such procedures involve immunizing an animal (preferably a mouse) with polypeptide or, more preferably, with a polypeptide-expressing cell. Such cells may be cultured in any suitable tissue culture medium; however, it is preferable to culture cells in Earle's modified Eagle's medium supplemented with 10% fetal bovine serum (inactivated at about 56 degrees C), and supplemented with about 10 g/l of nonessential amino acids, about 1,000 U/ml of penicillin, and about 100 ug/ml of streptomycin.

[0971] The splenocytes of such mice are extracted and fused with a suitable myeloma cell line. Any suitable myeloma cell line may be employed in accordance with the present invention; however, it is preferable to employ the parent myeloma cell line (SP20), available from the ATCC. After fusion, the resulting hybridoma cells are selectively maintained in HAT medium, and then cloned by limiting dilution as described by Wands et al. (Gastroenterology 80:225-232 (1981).) The hybridoma cells obtained through such a selection are then assayed to identify clones which secrete antibodies capable of binding the polypeptide.

[0972] Alternatively, additional antibodies capable of binding to the polypeptide can be produced in a two-step procedure using anti-idiotypic antibodies. Such a method makes use of the fact that antibodies are themselves antigens, and therefore, it is possible to obtain an antibody that binds to a second antibody. In accordance with this method, protein specific antibodies are used to immunize an animal, preferably a mouse. The splenocytes of such an animal are then used to produce hybridoma cells, and the hybridoma cells are screened to identify clones that produce an antibody whose ability to bind to the protein-specific antibody can be blocked by the polypeptide. Such antibodies comprise anti-idiotypic antibodies to the protein-specific antibody and can be used to immunize an animal to induce formation of further protein-specific antibodies.

[0973] It will be appreciated that Fab and F(ab′)2 and other fragments of the antibodies of the present invention may be used according to the methods disclosed herein. Such fragments are typically produced by proteolytic cleavage, using enzymes such as papain (to produce Fab fragments) or pepsin (to produce F(ab′)2 fragments). Alternatively, protein-binding fragments can be produced through the application of recombinant DNA technology or through synthetic chemistry.

[0974] For in vivo use of antibodies in humans, it may be preferable to use “humanized” chimeric monoclonal antibodies. Such antibodies can be produced using genetic constructs derived from hybridoma cells producing the monoclonal antibodies described above. Methods for producing chimeric antibodies are known in the art. (See, for review, Morrison, Science 229:1202 (1985); Oi et al., BioTechniques 4:214 (1986); Cabilly et al., U.S. Pat. No. 4,816,567; Taniguchi et al., EP 171496; Morrison et al., EP 173494; Neuberger et al., WO 8601533; Robinson et al., WO 8702671; Boulianne et al., Nature 312:643 (1984); Neuberger et al., Nature 314:268 (1985).)

[0975] Moreover, in another preferred method, the antibodies directed against the polypeptides of the present invention may be produced in plants. Specific methods are disclosed in U.S. Pat. Nos. 5,959,177, and 6,080,560, which are hereby incorporated in their entirety herein. The methods not only describe methods of expressing antibodies, but also the means of assembling foreign multimeric proteins in plants (i.e., antibodies, etc,), and the subsequent secretion of such antibodies from the plant.

### Example 17

### Alteration of Protein Glycosylation Sites to Enhance Characteristics of Polypeptides of the Invention

[0976] Many eukaryotic cell surface and proteins are post-translationally processed to incorporate N-linked and O-linked carbohydrates (Kornfeld and Kornfeld (1985) Annu. Rev. Biochem. 54:631-64; Rademacher et al., (1988) Annu. Rev. Biochem. 57:785-838). Protein glycosylation is thought to serve a variety of functions including: augmentation of protein folding, inhibition of protein aggregation, regulation of intracellular trafficking to organelles, increasing resistance to proteolysis, modulation of protein antigenicity, and mediation of intercellular adhesion (Fieldler and Simons (1995) Cell, 81:309-312; Helenius (1994) Mol. Biol. Of the Cell 5:253-265; Olden et al., (1978) Cell, 13:461-473; Caton et al., (1982) Cell, 37:417-427; Alexamnder and Elder (1984), Science, 226:1328-1330; and Flack et al., (1994), J. Biol. Chem., 269:14015-14020). In higher organisms, the nature and extent of glycosylation can markedly affect the circulating half-life and bio-availability of proteins by mechanisms involving receptor mediated uptake and clearance (Ashwell and Morrell, (1974), Adv. Enzymol., 41:99-128; Ashwell and Harford (1982), Ann. Rev. Biochem., 51:531-54). Receptor systems have been identified that are thought to play a major role in the clearance of serum proteins through recognition of various carbohydrate structures on the glycoproteins (Stockert (1995), Physiol. Rev., 75:591-609; Kery et al., (1992), Arch. Biochem. Biophys., 298:49-55). Thus, production strategies resulting in incomplete attachment of terminal sialic acid residues might provide a means of shortening the bioavailability and half-life of glycoproteins. Conversely, expression strategies resulting in saturation of terminal sialic acid attachment sites might lengthen protein bioavailability and half-life.

[0977] In the development of recombinant glycoproteins for use as pharmaceutical products, for example, it has been speculated that the pharmacodynamics of recombinant proteins can be modulated by the addition or deletion of glycosylation sites from a glycoproteins primary structure (Berman and Lasky (1985a) Trends in Biotechnol., 3:51-53). However, studies have reported that the deletion of N-linked glycosylation sites often impairs intracellular transport and results in the intracellular accumulation of glycosylation site variants (Machamer and Rose (1988), J. Biol Chem., 263:5955-5960; Gallagher et al., (1992), J. Virology., 66:7136-7145; Collier et al., (1993), Biochem., 32:7818-7823; Claffey et al., (1995) Biochemica et Biophysica Acta, 1246:1-9; Dube et al., (1988), J. Biol. Chem. 263:17516-17521). While glycosylation site variants of proteins can be expressed intracellularly, it has proved difficult to recover useful quantities from growth conditioned cell culture medium.

[0978] Moreover, it is unclear to what extent a glycosylation site in one species will be recognized by another species glycosylation machinery. Due to the importance of glycosylation in protein metabolism, particularly the secretion and/or expression of the protein, whether a glycosylation signal is recognized may profoundly determine a proteins ability to be expressed, either endogenously or recombinately, in another organism (i.e., expressing a human protein in E.coli, yeast, or viral organisms; or an E.coli, yeast, or viral protein in human, etc.). Thus, it may be desirable to add, delete, or modify a glycosylation site, and possibly add a glycosylation site of one species to a protein of another species to improve the proteins functional, bioprocess purification, and/or structural characteristics (e.g., a polypeptide of the present invention).

[0979] A number of methods may be employed to identify the location of glycosylation sites within a protein. One preferred method is to run the translated protein sequence through the PROSITE computer program (Swiss Institute of Bioinformatics). Once identified, the sites could be systematically deleted, or impaired, at the level of the DNA using mutagenesis methodology known in the art and available to the skilled artisan, Preferably using PCR-directed mutagenesis (See Maniatis, Molecular Cloning: A Laboratory Manual, Cold Spring Harbor Press, Cold Spring, N.Y. (1982)). Similarly, glycosylation sites could be added, or modified at the level of the DNA using similar methods, preferably PCR methods (See, Maniatis, supra). The results of modifying the glycosylation sites for a particular protein (e.g., solubility, secretion potential, activity, aggregation, proteolytic resistance, etc.) could then be analyzed using methods know in the art.

[0980] The skilled artisan would acknowledge the existence of other computer algorithms capable of predicting the location of glycosylation sites within a protein. For example, the Motif computer program (Genetics Computer Group suite of programs) provides this function, as well.

### Example 18

### Method of Enhancing the Biological Activity/Functional Characteristics of Invention Through Molecular Evolution

[0981] Although many of the most biologically active proteins known are highly effective for their specified function in an organism, they often possess characteristics that make them undesirable for transgenic, therapeutic, and/or industrial applications. Among these traits, a short physiological half-life is the most prominent problem, and is present either at the level of the protein, or the level of the proteins mRNA. The ability to extend the half-life, for example, would be particularly important for a proteins use in gene therapy, transgenic animal production, the bioprocess production and purification of the protein, and use of the protein as a chemical modulator among others. Therefore, there is a need to identify novel variants of isolated proteins possessing characteristics which enhance their application as a therapeutic for treating diseases of animal origin, in addition to the proteins applicability to common industrial and pharmaceutical applications.

[0982] Thus, one aspect of the present invention relates to the ability to enhance specific characteristics of invention through directed molecular evolution. Such an enhancement may, in a non-limiting example, benefit the inventions utility as an essential component in a kit, the inventions physical attributes such as its solubility, structure, or codon optimization, the inventions specific biological activity, including any associated enzymatic activity, the proteins enzyme kinetics, the proteins Ki, Kcat, Km, Vmax, Kd, protein-protein activity, protein-DNA binding activity, antagonist/inhibitory activity (including direct or indirect interaction), agonist activity (including direct or indirect interaction), the proteins antigenicity (e.g., where it would be desirable to either increase or decrease the antigenic potential of the protein), the immunogenicity of the protein, the ability of the protein to form dimers, trimers, or multimers with either itself or other proteins, the antigenic efficacy of the invention, including its subsequent use a preventative treatment for disease or disease states, or as an effector for targeting diseased genes. Moreover, the ability to enhance specific characteristics of a protein may also be applicable to changing the characterized activity of an enzyme to an activity completely unrelated to its initially characterized activity. Other desirable enhancements of the invention would be specific to each individual protein, and would thus be well known in the art and contemplated by the present invention.

[0983] Directed evolution is comprised of several steps. The first step is to establish a library of variants for the gene or protein of interest. The most important step is to then select for those variants that entail the activity you wish to identify. The design of the screen is essential since your screen should be selective enough to eliminate non-useful variants, but not so stringent as to eliminate all variants. The last step is then to repeat the above steps using the best variant from the previous screen. Each successive cycle, can then be tailored as necessary, such as increasing the stringency of the screen, for example.

[0984] Over the years, there have been a number of methods developed to introduce mutations into macromolecules. Some of these methods include, random mutagenesis, “error-prone” PCR, chemical mutagenesis, site-directed mutagenesis, and other methods well known in the art (for a comprehensive listing of current mutagenesis methods, see Maniatis, Molecular Cloning: A Laboratory Manual, Cold Spring Harbor Press, Cold Spring, N.Y. (1982)). Typically, such methods have been used, for example, as tools for identifying the core functional region(s) of a protein or the function of specific domains of a protein (if a multi-domain protein). However, such methods have more recently been applied to the identification of macromolecule variants with specific or enhanced characteristics.

[0985] Random mutagenesis has been the most widely recognized method to date. Typically, this has been carried out either through the use of “error-prone” PCR (as described in Moore, J., et al, Nature Biotechnology 14:458, (1996), or through the application of randomized synthetic oligonucleotides corresponding to specific regions of interest (as described by Derbyshire, K. M. et al, Gene, 46:145-152, (1986), and Hill, D E, et al, Methods Enzymol., 55:559-568, (1987). Both approaches have limits to the level of mutagenesis that can be obtained. However, either approach enables the investigator to effectively control the rate of mutagenesis. This is particularly important considering the fact that mutations beneficial to the activity of the enzyme are fairly rare. In fact, using too high a level of mutagenesis may counter or inhibit the desired benefit of a useful mutation.

[0986] While both of the aforementioned methods are effective for creating randomized pools of macromolecule variants, a third method, termed “DNA Shuffling”, or “sexual PCR” (W P C, Stemmer, PNAS, 91:10747, (1994)) has recently been elucidated. DNA shuffling has also been referred to as “directed molecular evolution”, “exon-shuffling”, “directed enzyme evolution”, “in vitro evolution”, and “artificial evolution”. Such reference terms are known in the art and are encompassed by the invention. This new, preferred, method apparently overcomes the limitations of the previous methods in that it not only propagates positive traits, but simultaneously eliminates negative traits in the resulting progeny.

[0987] DNA shuffling accomplishes this task by combining the principal of in vitro recombination, along with the method of “error-prone” PCR. In effect, you begin with a randomly digested pool of small fragments of your gene, created by Dnase I digestion, and then introduce said random fragments into an “error-prone” PCR assembly reaction. During the PCR reaction, the randomly sized DNA fragments not only hybridize to their cognate strand, but also may hybridize to other DNA fragments corresponding to different regions of the polynucleotide of interest—regions not typically accessible via hybridization of the entire polynucleotide. Moreover, since the PCR assembly reaction utilizes “error-prone” PCR reaction conditions, random mutations are introduced during the DNA synthesis step of the PCR reaction for all of the fragments—further diversifying the potential hybridization sites during the annealing step of the reaction.

[0988] A variety of reaction conditions could be utilized to carry-out the DNA shuffling reaction. However, specific reaction conditions for DNA shuffling are provided, for example, in PNAS, 91:10747, (1994). Briefly:

[0989] Prepare the DNA substrate to be subjected to the DNA shuffling reaction. Preparation may be in the form of simply purifying the DNA from contaminating cellular material, chemicals, buffers, oligonucleotide primers, deoxynucleotides, RNAs, etc., and may entail the use of DNA purification kits as those provided by Qiagen, Inc., or by the Promega, Corp., for example.

[0990] Once the DNA substrate has been purified, it would be subjected to Dnase I digestion. About 2-4 ug of the DNA substrate(s) would be digested with 0.0015 units of Dnase I (Sigma) per ul in 100 ul of 50 mM Tris-HCL, pH 7.4/1 mM MgCl2 for 10-20 min. at room temperature. The resulting fragments of 10-50bp could then be purified by running them through a 2% low-melting point agarose gel by electrophoresis onto DE81 ion-exchange paper (Whatmann) or could be purified using Microcon concentrators (Amicon) of the appropriate molecular weight cutoff, or could use oligonucleotide purification columns (Qiagen), in addition to other methods known in the art. If using DE81 ion-exchange paper, the 10-50 bp fragments could be eluted from said paper using 1M NaCl, followed by ethanol precipitation.

[0991] The resulting purified fragments would then be subjected to a PCR assembly reaction by re-suspension in a PCR mixture containing: 2 mM of each dNTP, 2.2 mM MgCl2, 50 mM KCl, 10 mM Tris.HCL, pH 9.0, and 0.1% Triton X-100, at a final fragment concentration of 10-30 ng/ul. No primers are added at this point. Taq DNA polymerase (Promega) would be used at 2.5 units per 100 ul of reaction mixture. A PCR program of 94 C for 60 s; 94 C for 30 s, 50-55 C for 30 s, and 72 C for 30 s using 30-45 cycles, followed by 72 C for 5 min using an MJ Research (Cambridge, Mass.) PTC-150 thermocycler. After the assembly reaction is completed, a 1:40 dilution of the resulting primerless product would then be introduced into a PCR mixture (using the same buffer mixture used for the assembly reaction) containing 0.8 um of each primer and subjecting this mixture to 15 cycles of PCR (using 94 C for 30 s, 50 C for 30 s, and 72 C for 30 s). The referred primers would be primers corresponding to the nucleic acid sequences of the polynucleotide(s) utilized in the shuffling reaction. Said primers could consist of modified nucleic acid base pairs using methods known in the art and referred to else where herein, or could contain additional sequences (i.e., for adding restriction sites, mutating specific base-pairs, etc.).

[0992] The resulting shuffled, assembled, and amplified product can be purified using methods well known in the art (e.g., Qiagen PCR purification kits) and then subsequently cloned using appropriate restriction enzymes.

[0993] Although a number of variations of DNA shuffling have been published to date, such variations would be obvious to the skilled artisan and are encompassed by the invention. The DNA shuffling method can also be tailored to the desired level of mutagenesis using the methods described by Zhao, et a]. (Nucl Acid Res., 25(6): 1307-1308, (1997).

[0994] As described above, once the randomized pool has been created, it can then be subjected to a specific screen to identify the variant possessing the desired characteristic(s). Once the variant has been identified, DNA corresponding to the variant could then be used as the DNA substrate for initiating another round of DNA shuffling. This cycle of shuffling, selecting the optimized variant of interest, and then re-shuffling, can be repeated until the ultimate variant is obtained. Examples of model screens applied to identify variants created using DNA shuffling technology may be found in the following publications: J. C., Moore, et al., J. Mol. Biol., 272:336-347, (1997), F. R., Cross, et al., Mol. Cell. Biol., 18:2923-2931, (1998), and A. Crameri., et al., Nat. Biotech., 15:436-438, (1997).

[0995] DNA shuffling has several advantages. First, it makes use of beneficial mutations. When combined with screening, DNA shuffling allows the discovery of the best mutational combinations and does not assume that the best combination contains all the mutations in a population. Secondly, recombination occurs simultaneously with point mutagenesis. An effect of forcing DNA polymerase to synthesize full-length genes from the small fragment DNA pool is a background mutagenesis rate. In combination with a stringent selection method, enzymatic activity has been evolved up to 16000 fold increase over the wild-type form of the enzyme. In essence, the background mutagenesis yielded the genetic variability on which recombination acted to enhance the activity.

[0996] A third feature of recombination is that it can be used to remove deleterious mutations. As discussed above, during the process of the randomization, for every one beneficial mutation, there may be at least one or more neutral or inhibitory mutations. Such mutations can be removed by including in the assembly reaction an excess of the wild-type random-size fragments, in addition to the random-size fragments of the selected mutant from the previous selection. During the next selection, some of the most active variants of the polynucleotide/polypeptide/enzyme, should have lost the inhibitory mutations.

[0997] Finally, recombination enables parallel processing. This represents a significant advantage since there are likely multiple characteristics that would make a protein more desirable (e.g. solubility, activity, etc.). Since it is increasingly difficult to screen for more than one desirable trait at a time, other methods of molecular evolution tend to be inhibitory. However, using recombination, it would be possible to combine the randomized fragments of the best representative variants for the various traits, and then select for multiple properties at once.

[0998] DNA shuffling can also be applied to the polynucleotides and polypeptides of the present invention to decrease their immunogenicity in a specified host. For example, a particular variant of the present invention may be created and isolated using DNA shuffling technology. Such a variant may have all of the desired characteristics, though may be highly immunogenic in a host due to its novel intrinsic structure. Specifically, the desired characteristic may cause the polypeptide to have a non-native structure which could no longer be recognized as a “self” molecule, but rather as a “foreign”, and thus activate a host immune response directed against the novel variant. Such a limitation can be overcome, for example, by including a copy of the gene sequence for a xenobiotic ortholog of the native protein in with the gene sequence of the novel variant gene in one or more cycles of DNA shuffling. The molar ratio of the ortholog and novel variant DNAs could be varied accordingly. Ideally, the resulting hybrid variant identified would contain at least some of the coding sequence which enabled the xenobiotic protein to evade the host immune system, and additionally, the coding sequence of the original novel variant that provided the desired characteristics.

[0999] Likewise, the invention encompasses the application of DNA shuffling technology to the evolution of polynucleotides and polypeptides of the invention, wherein one or more cycles of DNA shuffling include, in addition to the gene template DNA, oligonucleotides coding for known allelic sequences, optimized codon sequences, known variant sequences, known polynucleotide polymorphism sequences, known ortholog sequences, known homologue sequences, additional homologous sequences, additional non-homologous sequences, sequences from another species, and any number and combination of the above.

[1000] In addition to the described methods above, there are a number of related methods that may also be applicable, or desirable in certain cases. Representative among these are the methods discussed in PCT applications WO 98/31700, and WO 98/32845, which are hereby incorporated by reference. Furthermore, related methods can also be applied to the polynucleotide sequences of the present invention in order to evolve invention for creating ideal variants for use in gene therapy, protein engineering, evolution of whole cells containing the variant, or in the evolution of entire enzyme pathways containing polynucleotides of the invention as described in PCT applications WO 98/13485, WO 98/13487, WO 98/27230, WO 98/31837, and Crameri, A., et al., Nat. Biotech., 15:436-438, (1997), respectively.

[1001] Additional methods of applying “DNA Shuffling” technology to the polynucleotides and polypeptides of the present invention, including their proposed applications, may be found in U.S. Pat. No. 5,605,793; PCT Application No. WO 95/22625; PCT Application No. WO 97/20078; PCT Application No. WO 97/35966; and PCT Application No. WO 98/42832; PCT Application No. WO 00/09727 specifically provides methods for applying DNA shuffling to the identification of herbicide selective crops which could be applied to the polynucleotides and polypeptides of the present invention; additionally, PCT Application No. WO 00/12680 provides methods and compositions for generating, modifying, adapting, and optimizing polynucleotide sequences that confer detectable phenotypic properties on plant species; each of the above are hereby incorporated in their entirety herein for all purposes.

### Example 19

### Method of Determining Alterations in a Gene Corresponding to a Polynucleotide

[1002] RNA isolated from entire families or individual patients presenting with a phenotype of interest (such as a disease), is isolated. cDNA is then generated from these RNA samples using protocols known in the art. (See, Sambrook.) The cDNA is then used as a template for PCR, employing primers surrounding regions of interest, such as those sequences listed in the Sequence Listing and/or the Tables of the present invention. Suggested PCR conditions consist of 35 cycles at 95 degrees C for 30 seconds; 60-120 seconds at 52-58 degrees C; and 60-120 seconds at 70 degrees C, using buffer solutions described in Sidransky et al., Science 252:706 (1991).

[1003] PCR products are then sequenced using primers labeled at their 5′ end with T4 polynucleotide kinase, employing SequiTherm Polymerase. (Epicentre Technologies). The intron-exon borders of selected exons is also determined and genomic PCR products analyzed to confirm the results. PCR products harboring suspected mutations is then cloned and sequenced to validate the results of the direct sequencing.

[1004] PCR products are cloned into T-tailed vectors as described in Holton et al., Nucleic Acids Research, 19:1156 (1991) and sequenced with T7 polymerase (United States Biochemical). Affected individuals are identified by mutations not present in unaffected individuals.

[1005] Genomic rearrangements are also observed as a method of determining alterations in a gene corresponding to a polynucleotide. Genomic clones isolated according to the Examples provided herein or otherwise known in the art are nick-translated with digoxigenindeoxy-uridine 5′-triphosphate (Boehringer Manheim), and FISH performed as described in Johnson et al., Methods Cell Biol. 35:73-99 (1991). Hybridization with the labeled probe is carried out using a vast excess of human cot-1 DNA for specific hybridization to the corresponding genomic locus.

[1006] Chromosomes are counterstained with 4,6-diamino-2-phenylidole and propidium iodide, producing a combination of C- and R-bands. Aligned images for precise mapping are obtained using a triple-band filter set (Chroma Technology, Brattleboro, Vt.) in combination with a cooled charge-coupled device camera (Photometrics, Tucson, Ariz.) and variable excitation wavelength filters. (Johnson et al., Genet. Anal. Tech. Appl., 8:75 (1991).) Image collection, analysis and chromosomal fractional length measurements are performed using the ISee Graphical Program System. (Inovision Corporation, Durham, N.C.) Chromosome alterations of the genomic region hybridized by the probe are identified as insertions, deletions, and translocations. These alterations are used as a diagnostic marker for an associated disease.

### Example 20

### Method of Detecting Abnormal Levels of a Polypeptide in a Biological Sample

[1007] A polypeptide of the present invention can be detected in a biological sample, and if an increased or decreased level of the polypeptide is detected, this polypeptide is a marker for a particular phenotype. Methods of detection are numerous, and thus, it is understood that one skilled in the art can modify the following assay to fit their particular needs.

[1008] For example, antibody-sandwich ELISAs are used to detect polypeptides in a sample, preferably a biological sample. Wells of a microtiter plate are coated with specific antibodies, at a final concentration of 0.2 to 10 ug/ml. The antibodies are either monoclonal or polyclonal and are produced by the method described elsewhere herein. The wells are blocked so that non-specific binding of the polypeptide to the well is reduced.

[1009] The coated wells are then incubated for >2 hours at RT with a sample containing the polypeptide. Preferably, serial dilutions of the sample should be used to validate results. The plates are then washed three times with deionized or distilled water to remove unbounded polypeptide.

[1010] Next, 50 ul of specific antibody-alkaline phosphatase conjugate, at a concentration of 25-400 ng, is added and incubated for 2 hours at room temperature. The plates are again washed three times with deionized or distilled water to remove unbounded conjugate.

[1011] Add 75 ul of 4-methylumbelliferyl phosphate (MUP) or p-nitrophenyl phosphate (NPP) substrate solution to each well and incubate 1 hour at room temperature. Measure the reaction by a microtiter plate reader. Prepare a standard curve, using serial dilutions of a control sample, and plot polypeptide concentration on the X-axis (log scale) and fluorescence or absorbance of the Y-axis (linear scale). Interpolate the concentration of the polypeptide in the sample using the standard curve.

### Example 21

### Formulation

[1012] The invention also provides methods of treatment and/or prevention diseases, disorders, and/or conditions (such as, for example, any one or more of the diseases or disorders disclosed herein) by administration to a subject of an effective amount of a Therapeutic. By therapeutic is meant a polynucleotides or polypeptides of the invention (including fragments and variants), agonists or antagonists thereof, and/or antibodies thereto, in combination with a pharmaceutically acceptable carrier type (e.g., a sterile carrier).

[1013] The Therapeutic will be formulated and dosed in a fashion consistent with good medical practice, taking into account the clinical condition of the individual patient (especially the side effects of treatment with the Therapeutic alone), the site of delivery, the method of administration, the scheduling of administration, and other factors known to practitioners. The “effective amount” for purposes herein is thus determined by such considerations.

[1014] As a general proposition, the total pharmaceutically effective amount of the Therapeutic administered parenterally per dose will be in the range of about 1 ug/kg/day to 10 mg/kg/day of patient body weight, although, as noted above, this will be subject to therapeutic discretion. More preferably, this dose is at least 0.01 mg/kg/day, and most preferably for humans between about 0.01 and 1 mg/kg/day for the hormone. If given continuously, the Therapeutic is typically administered at a dose rate of about 1 ug/kg/hour to about 50 ug/kg/hour, either by 1-4 injections per day or by continuous subcutaneous infusions, for example, using a mini-pump. An intravenous bag solution may also be employed. The length of treatment needed to observe changes and the interval following treatment for responses to occur appears to vary depending on the desired effect.

[1015] Therapeutics can be administered orally, rectally, parenterally, intracisternally, intravaginally, intraperitoneally, topically (as by powders, ointments, gels, drops or transdermal patch), bucally, or as an oral or nasal spray. “Pharmaceutically acceptable carrier” refers to a non-toxic solid, semisolid or liquid filler, diluent, encapsulating material or formulation auxiliary of any. The term “parenteral” as used herein refers to modes of administration which include intravenous, intramuscular, intraperitoneal, intrasternal, subcutaneous and intraarticular injection and infusion.

[1016] Therapeutics of the invention are also suitably administered by sustained-release systems. Suitable examples of sustained-release Therapeutics are administered orally, rectally, parenterally, intracisternally, intravaginally, intraperitoneally, topically (as by powders, ointments, gels, drops or transdermal patch), bucally, or as an oral or nasal spray. “Pharmaceutically acceptable carrier” refers to a non-toxic solid, semisolid or liquid filler, diluent, encapsulating material or formulation auxiliary of any type. The term “parenteral” as used herein refers to modes of administration which include intravenous, intramuscular, intraperitoneal, intrasternal, subcutaneous and intraarticular injection and infusion.

[1017] Therapeutics of the invention may also be suitably administered by sustained-release systems. Suitable examples of sustained-release Therapeutics include suitable polymeric materials (such as, for example, semi-permeable polymer matrices in the form of shaped articles, e.g., films, or microcapsules), suitable hydrophobic materials (for example as an emulsion in an acceptable oil) or ion exchange resins, and sparingly soluble derivatives (such as, for example, a sparingly soluble salt).

[1018] Sustained-release matrices include polylactides (U.S. Pat. No. 3,773,919, EP 58,481), copolymers of L-glutamic acid and gamma-ethyl-L-glutamate (Sidman et al., Biopolymers 22:547-556 (1983)), poly (2-hydroxyethyl methacrylate) (Langer et al., J. Biomed. Mater. Res. 15:167-277 (1981), and Langer, Chem. Tech. 12:98-105 (1982)), ethylene vinyl acetate (Langer et al., Id.) or poly-D-(−)-3-hydroxybutyric acid (EP 133,988).

[1019] Sustained-release Therapeutics also include liposomally entrapped Therapeutics of the invention (see, generally, Langer, Science 249:1527-1533 (1990); Treat et al., in Liposomes in the Therapy of Infectious Disease and Cancer, Lopez-Berestein and Fidler (eds.), Liss, N.Y., pp. 317 -327 and 353-365 (1989)). Liposomes containing the Therapeutic are prepared by methods known per se: DE 3,218,121, Epstein et al., Proc. Natl. Acad. Sci. (USA) 82:3688-3692 (1985); Hwang et al., Proc. Natl. Acad. Sci.(USA) 77:4030-4034 (1980); EP 52,322; EP 36,676; EP 88,046; EP 143,949; EP 142,641; Japanese Pat. Appl. 83-118008; U.S. Pat. Nos. 4,485,045 and 4,544,545; and EP 102,324. Ordinarily, the liposomes are of the small (about 200-800 Angstroms) unilamellar type in which the lipid content is greater than about 30 mol. percent cholesterol, the selected proportion being adjusted for the optimal Therapeutic.

[1020] In yet an additional embodiment, the Therapeutics of the invention are delivered by way of a pump (see Langer, supra; Sefton, CRC Crit. Ref. Biomed. Eng. 14:201 (1987); Buchwald et al., Surgery 88:507 (1980); Saudek et al., N. Engl. J. Med. 321:574 (1989)).

[1021] Other controlled release systems are discussed in the review by Langer (Science 249:1527-1533 (1990)).

[1022] For parenteral administration, in one embodiment, the Therapeutic is formulated generally by mixing it at the desired degree of purity, in a unit dosage injectable form (solution, suspension, or emulsion), with a pharmaceutically acceptable carrier, i.e., one that is non-toxic to recipients at the dosages and concentrations employed and is compatible with other ingredients of the formulation. For example, the formulation preferably does not include oxidizing agents and other compounds that are known to be deleterious to the Therapeutic.

[1023] Generally, the formulations are prepared by contacting the Therapeutic uniformly and intimately with liquid carriers or finely divided solid carriers or both. Then, if necessary, the product is shaped into the desired formulation. Preferably the carrier is a parenteral carrier, more preferably a solution that is isotonic with the blood of the recipient. Examples of such carrier vehicles include water, saline, Ringer's solution, and dextrose solution. Non-aqueous vehicles such as fixed oils and ethyl oleate are also useful herein, as well as liposomes.

[1024] The carrier suitably contains minor amounts of additives such as substances that enhance isotonicity and chemical stability. Such materials are non-toxic to recipients at the dosages and concentrations employed, and include buffers such as phosphate, citrate, succinate, acetic acid, and other organic acids or their salts; antioxidants such as ascorbic acid; low molecular weight (less than about ten residues) polypeptides, e.g., polyarginine or tripeptides; proteins, such as serum albumin, gelatin, or immunoglobulins; hydrophilic polymers such as polyvinylpyrrolidone; amino acids, such as glycine, glutamic acid, aspartic acid, or arginine; monosaccharides, disaccharides, and other carbohydrates including cellulose or its derivatives, glucose, mannose, or dextrins; chelating agents such as EDTA; sugar alcohols such as mannitol or sorbitol; counterions such as sodium; and/or nonionic surfactants such as polysorbates, poloxamers, or PEG.

[1025] The Therapeutic will typically be formulated in such vehicles at a concentration of about 0.1 mg/ml to 100 mg/ml, preferably 1-10 mg/ml, at a pH of about 3 to 8. It will be understood that the use of certain of the foregoing excipients, carriers, or stabilizers will result in the formation of polypeptide salts.

[1026] Any pharmaceutical used for therapeutic administration can be sterile. Sterility is readily accomplished by filtration through sterile filtration membranes (e.g., 0.2 micron membranes). Therapeutics generally are placed into a container having a sterile access port, for example, an intravenous solution bag or vial having a stopper pierceable by a hypodermic injection needle.

[1027] Therapeutics ordinarily will be stored in unit or multi-dose containers, for example, sealed ampoules or vials, as an aqueous solution or as a lyophilized formulation for reconstitution. As an example of a lyophilized formulation, 10-ml vials are filled with 5 ml of sterile-filtered 1% (w/v) aqueous Therapeutic solution, and the resulting mixture is lyophilized. The infusion solution is prepared by reconstituting the lyophilized Therapeutic using bacteriostatic Water-for-Injection.

[1028] The invention also provides a pharmaceutical pack or kit comprising one or more containers filled with one or more of the ingredients of the Therapeutics of the invention. Associated with such container(s) can be a notice in the form prescribed by a governmental agency regulating the manufacture, use or sale of pharmaceuticals or biological products, which notice reflects approval by the agency of manufacture, use or sale for human administration. In addition, the Therapeutics may be employed in conjunction with other therapeutic compounds.

[1029] The Therapeutics of the invention may be administered alone or in combination with adjuvants. Adjuvants that may be administered with the Therapeutics of the invention include, but are not limited to, alum, alum plus deoxycholate (ImmunoAg), MTP-PE (Biocine Corp.), QS21 (Genentech, Inc.), BCG, and MPL. In a specific embodiment, Therapeutics of the invention are administered in combination with alum. In another specific embodiment, Therapeutics of the invention are administered in combination with QS-21. Further adjuvants that may be administered with the Therapeutics of the invention include, but are not limited to, Monophosphoryl lipid immunomodulator, AdjuVax 100a, QS-21, QS-18, CRL1005, Aluminum salts, MF-59, and Virosomal adjuvant technology. Vaccines that may be administered with the Therapeutics of the invention include, but are not limited to, vaccines directed toward protection against MMR (measles, mumps, rubella), polio, varicella, tetanus/diptheria, hepatitis A, hepatitis B, haemophilus influenzae B, whooping cough, pneumonia, influenza, Lyme's Disease, rotavirus, cholera, yellow fever, Japanese encephalitis, poliomyelitis, rabies, typhoid fever, and pertussis. Combinations may be administered either concomitantly, e.g., as an admixture, separately but simultaneously or concurrently; or sequentially. This includes presentations in which the combined agents are administered together as a therapeutic mixture, and also procedures in which the combined agents are administered separately but simultaneously, e.g., as through separate intravenous lines into the same individual. Administration “in combination” further includes the separate administration of one of the compounds or agents given first, followed by the second.

[1030] The Therapeutics of the invention may be administered alone or in combination with other therapeutic agents. Therapeutic agents that may be administered in combination with the Therapeutics of the invention, include but not limited to, other members of the TNF family, chemotherapeutic agents, antibiotics, steroidal and non-steroidal anti-inflammatories, conventional immunotherapeutic agents, cytokines and/or growth factors. Combinations may be administered either concomitantly, e.g., as an admixture, separately but simultaneously or concurrently; or sequentially. This includes presentations in which the combined agents are administered together as a therapeutic mixture, and also procedures in which the combined agents are administered separately but simultaneously, e.g., as through separate intravenous lines into the same individual. Administration “in combination” further includes the separate administration of one of the compounds or agents given first, followed by the second.

[1031] In one embodiment, the Therapeutics of the invention are administered in combination with members of the TNF family. TNF, TNF-related or TNF-like molecules that may be administered with the Therapeutics of the invention include, but are not limited to, soluble forms of TNF-alpha, lymphotoxin-alpha (LT-alpha, also known as TNF-beta), LT-beta (found in complex heterotrimer LT-alpha2-beta), OPGL, FasL, CD27L, CD30L, CD40L, 4-1BBL, DcR3, OX40L, TNF-gamma (International Publication No. WO 96/14328), AIM-I (International Publication No. WO 97/33899), endokine-alpha (International Publication No. WO 98/07880), TR6 (International Publication No. WO 98/30694), OPG, and neutrokine-alpha (International Publication No. WO 98/18921, OX40, and nerve growth factor (NGF), and soluble forms of Fas, CD30, CD27, CD40 and 4-IBB, TR2 (International Publication No. WO 96/34095), DR3 (International Publication No. WO 97/33904), DR4 (International Publication No. WO 98/32856), TR5 (International Publication No. WO 98/30693), TR6 (International Publication No. WO 98/30694), TR7 (International Publication No. WO 98/41629), TRANK, TR9 (International Publication No. WO 98/56892),TRIO (International Publication No. WO 98/54202), 312C2 (International Publication No. WO 98/06842), and TR12, and soluble forms CD154, CD70, and CD153.

[1032] In certain embodiments, Therapeutics of the invention are administered in combination with antiretroviral agents, nucleoside reverse transcriptase inhibitors, non-nucleoside reverse transcriptase inhibitors, and/or protease inhibitors. Nucleoside reverse transcriptase inhibitors that may be administered in combination with the Therapeutics of the invention, include, but are not limited to, RETROVIR (zidovudine/AZT), VIDEX (didanosine/ddl), HIVID (zalcitabine/ddC), ZERIT (stavudine/d4T), EPIVIR (lamivudine/3TC), and COMBIVIR (zidovudine/lamivudine). Non-nucleoside reverse transcriptase inhibitors that may be administered in combination with the Therapeutics of the invention, include, but are not limited to, VIRAMUNE (nevirapine), RESCRIPTOR (delavirdine), and SUSTIVA (efavirenz). Protease inhibitors that may be administered in combination with the Therapeutics of the invention, include, but are not limited to, CRIXIVAN (indinavir), NORVIR (ritonavir), INVIRASE (saquinavir), and VIRACEPT (nelfinavir). In a specific embodiment, antiretroviral agents, nucleoside reverse transcriptase inhibitors, non-nucleoside reverse transcriptase inhibitors, and/or protease inhibitors may be used in any combination with Therapeutics of the invention to treat AIDS and/or to prevent or treat HIV infection.

[1033] In other embodiments, Therapeutics of the invention may be administered in combination with anti-opportunistic infection agents. Anti-opportunistic agents that may be administered in combination with the Therapeutics of the invention, include, but are not limited to, TRIMETHOPRIM-SULFAMETHOXAZOLE, DAPSONE, PENTAMIDINE, ATOVAQUONE, ISONIAZID, RIFAMPIN, PYRAZINAMIDE, ETHAMBUTOL, RIFABUTIN, CLARITHROMYCIN, AZITHROMYCIN, GANCICLOVIR, FOSCARNET, CIDOFOVIR, FLUCONAZOLE, ITRACONAZOLE, KETOCONAZOLE, ACYCLOVIR, FAMCICOLVIR, PYRIMETHAMINE, LEUCOVORIN, NEUPOGEN (filgrastim/G-CSF), and LEUKINE (sargramostim/GM-CSF). In a specific embodiment, Therapeutics of the invention are used in any combination with TRIMETHOPRIM-SULFAMETHOXAZOLE, DAPSONE, PENTAMIDINE, and/or ATOVAQUONE to prophylactically treat or prevent an opportunistic Pneumocystis carinii pneumonia infection. In another specific embodiment, Therapeutics of the invention are used in any combination with ISONIAZID, RIFAMPIN, PYRAZINAMIDE, and/or ETHAMBUTOL to prophylactically treat or prevent an opportunistic Mycobacterium avium complex infection. In another specific embodiment, Therapeutics of the invention are used in any combination with RIFABUTIN, CLARITHROMYCIN, and/or AZITHROMYCIN to prophylactically treat or prevent an opportunistic Mycobacterium tuberculosis infection. In another specific embodiment, Therapeutics of the invention are used in any combination with GANCICLOVIR, FOSCARNET, and/or CIDOFOVIR to prophylactically treat or prevent an opportunistic cytomegalovirus infection. In another specific embodiment, Therapeutics of the invention are used in any combination with FLUCONAZOLE, ITRACONAZOLE, and/or KETOCONAZOLE to prophylactically treat or prevent an opportunistic fungal infection. In another specific embodiment, Therapeutics of the invention are used in any combination with ACYCLOVIR and/or FAMCICOLVIR to prophylactically treat or prevent an opportunistic herpes simplex virus type I and/or type II infection. In another specific embodiment, Therapeutics of the invention are used in any combination with PYRIMETHAMINE and/or LEUCOVORIN to prophylactically treat or prevent an opportunistic Toxoplasma gondii infection. In another specific embodiment, Therapeutics of the invention are used in any combination with LEUCOVORIN and/or NEUPOGEN to prophylactically treat or prevent an opportunistic bacterial infection.

[1034] In a further embodiment, the Therapeutics of the invention are administered in combination with an antiviral agent. Antiviral agents that may be administered with the Therapeutics of the invention include, but are not limited to, acyclovir, ribavirin, amantadine, and remantidine.

[1035] In a further embodiment, the Therapeutics of the invention are administered in combination with an antibiotic agent. Antibiotic agents that may be administered with the Therapeutics of the invention include, but are not limited to, amoxicillin, beta-lactamases, aminoglycosides, beta-lactam (glycopeptide), beta-lactamases, Clindamycin, chloramphenicol, cephalosporins, ciprofloxacin, ciprofloxacin, erythromycin, fluoroquinolones, macrolides, metronidazole, penicillins, quinolones, rifampin, streptomycin, sulfonamide, tetracyclines, trimethoprim, trimethoprim-sulfamthoxazole, and vancomycin.

[1036] Conventional nonspecific immunosuppressive agents, that may be administered in combination with the Therapeutics of the invention include, but are not limited to, steroids, cyclosporine, cyclosporine analogs, cyclophosphamide methylprednisone, prednisone, azathioprine, FK-506, 15-deoxyspergualin, and other immunosuppressive agents that act by suppressing the function of responding T cells.

[1037] In specific embodiments, Therapeutics of the invention are administered in combination with immunosuppressants. Immunosuppressants preparations that may be administered with the Therapeutics of the invention include, but are not limited to, ORTHOCLONE (OKT3), SANDIMMUNE/NEORAL/SANGDYA (cyclosporin), PROGRAF (tacrolimus), CELLCEPT (mycophenolate), Azathioprine, glucorticosteroids, and RAPAMUNE (sirolimus). In a specific embodiment, immunosuppressants may be used to prevent rejection of organ or bone marrow transplantation.

[1038] In an additional embodiment, Therapeutics of the invention are administered alone or in combination with one or more intravenous immune globulin preparations. Intravenous immune globulin preparations that may be administered with the Therapeutics of the invention include, but not limited to, GAMMAR, IVEEGAM, SANDOGLOBULIN, GAMMAGARD S/D, and GAMIMUNE. In a specific embodiment, Therapeutics of the invention are administered in combination with intravenous immune globulin preparations in transplantation therapy (e.g., bone marrow transplant).

[1039] In an additional embodiment, the Therapeutics of the invention are administered alone or in combination with an anti-inflammatory agent. Anti-inflammatory agents that may be administered with the Therapeutics of the invention include, but are not limited to, glucocorticoids and the nonsteroidal anti-inflammatories, aminoarylcarboxylic acid derivatives, arylacetic acid derivatives, arylbutyric acid derivatives, arylcarboxylic acids, arylpropionic acid derivatives, pyrazoles, pyrazolones, salicylic acid derivatives, thiazinecarboxamides, e-acetamidocaproic acid, S-adenosylmethionine, 3-amino-4-hydroxybutyric acid, amixetrine, bendazac, benzydamine, bucolome, difenpiramide, ditazol, emorfazone, guaiazulene, nabumetone, nimesulide, orgotein, oxaceprol, paranyline, perisoxal, pifoxime, proquazone, proxazole, and tenidap.

[1040] In another embodiment, compositions of the invention are administered in combination with a chemotherapeutic agent. Chemotherapeutic agents that may be administered with the Therapeutics of the invention include, but are not limited to, antibiotic derivatives (e.g., doxorubicin, bleomycin, daunorubicin, and dactinomycin); antiestrogens (e.g., tamoxifen); antimetabolites (e.g., fluorouracil, 5-FU, methotrexate, floxuridine, interferon alpha-2b, glutamic acid, plicamycin, mercaptopurine, and 6-thioguanine); cytotoxic agents (e.g., carmustine, BCNU, lomustine, CCNU, cytosine arabinoside, cyclophosphamide, estramustine, hydroxyurea, procarbazine, mitomycin, busulfan, cis-platin, and vincristine sulfate); hormones (e.g., medroxyprogesterone, estramustine phosphate sodium, ethinyl estradiol, estradiol, megestrol acetate, methyltestosterone, diethylstilbestrol diphosphate, chlorotrianisene, and testolactone); nitrogen mustard derivatives (e.g., mephalen, chorambucil, mechlorethamine (nitrogen mustard) and thiotepa); steroids and combinations (e.g., bethamethasone sodium phosphate); and others (e.g., dicarbazine, asparaginase, mitotane, vincristine sulfate, vinblastine sulfate, and etoposide).

[1041] In a specific embodiment, Therapeutics of the invention are administered in combination with CHOP (cyclophosphamide, doxorubicin, vincristine, and prednisone) or any combination of the components of CHOP. In another embodiment, Therapeutics of the invention are administered in combination with Rituximab. In a further embodiment, Therapeutics of the invention are administered with Rituxmab and CHOP, or Rituxmab and any combination of the components of CHOP.

[1042] In an additional embodiment, the Therapeutics of the invention are administered in combination with cytokines. Cytokines that may be administered with the Therapeutics of the invention include, but are not limited to, IL2, IL3, IL4, IL5, IL6, IL7, IL10, IL-12, IL-13, IL-15, anti-CD40, CD40L, IFN-gamma and TNF-alpha. In another embodiment, Therapeutics of the invention may be administered with any interleukin, including, but not limited to, IL-1alpha, IL-1beta, IL-2, IL-3, IL-4, IL-5, IL-6, IL-7, IL-8, IL-9, IL-10, IL-11, IL-12, IL-13, IL-14, IL-15, IL-16, IL-17, IL-18, IL-19, IL-20, and IL-21.

[1043] In an additional embodiment, the Therapeutics of the invention are administered in combination with angiogenic proteins. Angiogenic proteins that may be administered with the Therapeutics of the invention include, but are not limited to, Glioma Derived Growth Factor (GDGF), as disclosed in European Patent Number EP-399816; Platelet Derived Growth Factor-A (PDGF-A), as disclosed in European Patent Number EP-6821 10; Platelet Derived Growth Factor-B (PDGF-B), as disclosed in European Patent Number EP-282317; Placental Growth Factor (PlGF), as disclosed in International Publication Number WO 92/06194; Placental Growth Factor-2 (PIGF-2), as disclosed in Hauser et al., Gorwth Factors, 4:259-268 (1993); Vascular Endothelial Growth Factor (VEGF), as disclosed in International Publication Number WO 90/13649; Vascular Endothelial Growth Factor-A (VEGF-A), as disclosed in European Patent Number EP-506477; Vascular Endothelial Growth Factor-2 (VEGF-2), as disclosed in International Publication Number WO 96/39515; Vascular Endothelial Growth Factor B (VEGF-3); Vascular Endothelial Growth Factor B-186 (VEGF-B186), as disclosed in International Publication Number WO 96/26736; Vascular Endothelial Growth Factor-D (VEGF-D), as disclosed in International Publication Number WO 98/02543; Vascular Endothelial Growth Factor-D (VEGF-D), as disclosed in International Publication Number WO 98/07832; and Vascular Endothelial Growth Factor-E (VEGF-E), as disclosed in German Patent Number DE19639601. The above mentioned references are incorporated herein by reference herein.

[1044] In an additional embodiment, the Therapeutics of the invention are administered in combination with hematopoietic growth factors. Hematopoietic growth factors that may be administered with the Therapeutics of the invention include, but are not limited to, LEUKINE (SARGRAMOSTIM) and NEUPOGEN (FILGRASTIM).

[1045] In an additional embodiment, the Therapeutics of the invention are administered in combination with Fibroblast Growth Factors. Fibroblast Growth Factors that may be administered with the Therapeutics of the invention include, but are not limited to, FGF-1, FGF-2, FGF-3, FGF-4, FGF-5, FGF-6, FGF-7, FGF-8, FGF-9, FGF-10, FGF-11, FGF-12, FGF-13, FGF-14, and FGF-15.

[1046] In a specific embodiment, formulations of the present invention may further comprise antagonists of P-glycoprotein (also referred to as the multiresistance protein, or PGP), including antagonists of its encoding polynucleotides (e.g., antisense oligonucleotides, ribozymes, zinc-finger proteins, etc.). P-glycoprotein is well known for decreasing the efficacy of various drug administrations due to its ability to export intracellular levels of absorbed drug to the cell exterior. While this activity has been particularly pronounced in cancer cells in response to the administration of chemotherapy regimens, a variety of other cell types and the administration of other drug classes have been noted (e.g., T-cells and anti-HIV drugs). In fact, certain mutations in the PGP gene significantly reduces PGP function, making it less able to force drugs out of cells. People who have two versions of the mutated gene—one inherited from each parent—have more than four times less PGP than those with two normal versions of the gene. People may also have one normal gene and one mutated one. Certain ethnic populations have increased incidence of such PGP mutations. Among individuals from Ghana, Kenya, the Sudan, as well as African Americans, frequency of the normal gene ranged from 73% to 84%. In contrast, the frequency was 34% to 59% among British whites, Portuguese, Southwest Asian, Chinese, Filipino and Saudi populations. As a result, certain ethnic populations may require increased administration of PGP antagonist in the formulation of the present invention to arrive at the an efficacious dose of the therapeutic (e.g., those from African descent). Conversely, certain ethnic populations, particularly those having increased frequency of the mutated PGP (e.g., of Caucasian descent, or non-African descent) may require less pharmaceutical compositions in the formulation due to an effective increase in efficacy of such compositions as a result of the increased effective absorption (e.g., less PGP activity) of said composition.

[1047] Moreover, in another specific embodiment, formulations of the present invention may further comprise antagonists of OATP2 (also referred to as the multiresistance protein, or MRP2), including antagonists of its encoding polynucleotides (e.g., antisense oligonucleotides, ribozymes, zinc-finger proteins, etc.). The invention also further comprises any additional antagonists known to inhibit proteins thought to be attributable to a multidrug resistant phenotype in proliferating cells.

[1048] Preferred antagonists that formulations of the present may comprise include the potent P-glycoprotein inhibitor elacridar, and/or LY-335979. Other P-glycoprotein inhibitors known in the art are also encompassed by the present invention.

[1049] In additional embodiments, the Therapeutics of the invention are administered in combination with other therapeutic or prophylactic regimens, such as, for example, radiation therapy.

### Example 22

### Method of Treating Decreased Levels of the Polypeptide

[1050] The present invention relates to a method for treating an individual in need of an increased level of a polypeptide of the invention in the body comprising administering to such an individual a composition comprising a therapeutically effective amount of an agonist of the invention (including polypeptides of the invention). Moreover, it will be appreciated that conditions caused by a decrease in the standard or normal expression level of a secreted protein in an individual can be treated by administering the polypeptide of the present invention, preferably in the secreted form. Thus, the invention also provides a method of treatment of an individual in need of an increased level of the polypeptide comprising administering to such an individual a Therapeutic comprising an amount of the polypeptide to increase the activity level of the polypeptide in such an individual.

[1051] For example, a patient with decreased levels of a polypeptide receives a daily dose 0.1-100 ug/kg of the polypeptide for six consecutive days. Preferably, the polypeptide is in the secreted form. The exact details of the dosing scheme, based on administration and formulation, are provided herein.

### Example 23

### Method of Treating Increased Levels of the Polypeptide

[1052] The present invention also relates to a method of treating an individual in need of a decreased level of a polypeptide of the invention in the body comprising administering to such an individual a composition comprising a therapeutically effective amount of an antagonist of the invention (including polypeptides and antibodies of the invention).

[1053] In one example, antisense technology is used to inhibit production of a polypeptide of the present invention. This technology is one example of a method of decreasing levels of a polypeptide, preferably a secreted form, due to a variety of etiologies, such as cancer. For example, a patient diagnosed with abnormally increased levels of a polypeptide is administered intravenously antisense polynucleotides at 0.5, 1.0, 1.5, 2.0 and 3.0 mg/kg day for 21 days. This treatment is repeated after a 7-day rest period if the treatment was well tolerated. The formulation of the antisense polynucleotide is provided herein.

### Example 24

### Method of Treatment Using Gene Therapy-Ex Vivo

[1054] One method of gene therapy transplants fibroblasts, which are capable of expressing a polypeptide, onto a patient. Generally, fibroblasts are obtained from a subject by skin biopsy. The resulting tissue is placed in tissue-culture medium and separated into small pieces. Small chunks of the tissue are placed on a wet surface of a tissue culture flask, approximately ten pieces are placed in each flask. The flask is turned upside down, closed tight and left at room temperature over night. After 24 hours at room temperature, the flask is inverted and the chunks of tissue remain fixed to the bottom of the flask and fresh media (e.g., Ham's F12 media, with 10% FBS, penicillin and streptomycin) is added. The flasks are then incubated at 37 degree C for approximately one week.

[1055] At this time, fresh media is added and subsequently changed every several days. After an additional two weeks in culture, a monolayer of fibroblasts emerge. The monolayer is trypsinized and scaled into larger flasks.

[1056] pMV-7 (Kirschmeier, P. T. et al., DNA, 7:219-25 (1988)), flanked by the long terminal repeats of the Moloney murine sarcoma virus, is digested with EcoRI and HindIII and subsequently treated with calf intestinal phosphatase. The linear vector is fractionated on agarose gel and purified, using glass beads.

[1057] The cDNA encoding a polypeptide of the present invention can be amplified using PCR primers which correspond to the 5′ and 3′ end sequences respectively as set forth in the Examples herein or otherwise known in the art, using primers and having appropriate restriction sites and initiation/stop codons, if necessary. Preferably, the 5′ primer contains an EcoRI site and the 3′ primer includes a HindIII site. Equal quantities of the Moloney murine sarcoma virus linear backbone and the amplified EcoRI and HindIII fragment are added together, in the presence of T4 DNA ligase. The resulting mixture is maintained under conditions appropriate for ligation of the two fragments. The ligation mixture is then used to transform bacteria HB101, which are then plated onto agar containing kanamycin for the purpose of confirming that the vector has the gene of interest properly inserted.

[1058] The amphotropic pA317 or GP+am12 packaging cells are grown in tissue culture to confluent density in Dulbecco's Modified Eagles Medium (DMEM) with 10% calf serum (CS), penicillin and streptomycin. The MSV vector containing the gene is then added to the media and the packaging cells transduced with the vector. The packaging cells now produce infectious viral particles containing the gene (the packaging cells are now referred to as producer cells).

[1059] Fresh media is added to the transduced producer cells, and subsequently, the media is harvested from a 10 cm plate of confluent producer cells. The spent media, containing the infectious viral particles, is filtered through a millipore filter to remove detached producer cells and this media is then used to infect fibroblast cells. Media is removed from a sub-confluent plate of fibroblasts and quickly replaced with the media from the producer cells. This media is removed and replaced with fresh media. If the titer of virus is high, then virtually all fibroblasts will be infected and no selection is required. If the titer is very low, then it is necessary to use a retroviral vector that has a selectable marker, such as neo or his. Once the fibroblasts have been efficiently infected, the fibroblasts are analyzed to determine whether protein is produced.

[1060] The engineered fibroblasts are then transplanted onto the host, either alone or after having been grown to confluence on cytodex 3 microcarrier beads.

### Example 25

### Gene Therapy Using Endogenous Genes Corresponding to Polynucleotides of the Invention

[1061] Another method of gene therapy according to the present invention involves operably associating the endogenous polynucleotide sequence of the invention with a promoter via homologous recombination as described, for example, in U.S. Pat. No. 5,641,670, issued Jun. 24, 1997; International Publication NO: WO 96/29411, published Sep. 26, 1996; International Publication NO: WO 94/12650, published Aug. 4, 1994; Koller et al., Proc. Natl. Acad. Sci. USA, 86:8932-8935 (1989); and Zijlstra et al., Nature, 342:435-438 (1989). This method involves the activation of a gene which is present in the target cells, but which is not expressed in the cells, or is expressed at a lower level than desired.

[1062] Polynucleotide constructs are made which contain a promoter and targeting sequences, which are homologous to the 5′ non-coding sequence of endogenous polynucleotide sequence, flanking the promoter. The targeting sequence will be sufficiently near the 5′ end of the polynucleotide sequence so the promoter will be operably linked to the endogenous sequence upon homologous recombination. The promoter and the targeting sequences can be amplified using PCR. Preferably, the amplified promoter contains distinct restriction enzyme sites on the 5′ and 3′ ends. Preferably, the 3′ end of the first targeting sequence contains the same restriction enzyme site as the 5′ end of the amplified promoter and the 5′ end of the second targeting sequence contains the same restriction site as the 3′ end of the amplified promoter.

[1063] The amplified promoter and the amplified targeting sequences are digested with the appropriate restriction enzymes and subsequently treated with calf intestinal phosphatase. The digested promoter and digested targeting sequences are added together in the presence of T4 DNA ligase. The resulting mixture is maintained under conditions appropriate for ligation of the two fragments. The construct is size fractionated on an agarose gel then purified by phenol extraction and ethanol precipitation.

[1064] In this Example, the polynucleotide constructs are administered as naked polynucleotides via electroporation. However, the polynucleotide constructs may also be administered with transfection-facilitating agents, such as liposomes, viral sequences, viral particles, precipitating agents, etc. Such methods of delivery are known in the art.

[1065] Once the cells are transfected, homologous recombination will take place which results in the promoter being operably linked to the endogenous polynucleotide sequence. This results in the expression of polynucleotide corresponding to the polynucleotide in the cell. Expression may be detected by immunological staining, or any other method known in the art.

[1066] Fibroblasts are obtained from a subject by skin biopsy. The resulting tissue is placed in DMEM+10% fetal calf serum. Exponentially growing or early stationary phase fibroblasts are trypsinized and rinsed from the plastic surface with nutrient medium. An aliquot of the cell suspension is removed for counting, and the remaining cells are subjected to centrifugation. The supernatant is aspirated and the pellet is resuspended in 5 ml of electroporation buffer (20 mM HEPES pH 7.3, 137 mM NaCl, 5 mM KCl, 0.7 mM Na2 HPO4, 6 mM dextrose). The cells are recentrifuged, the supernatant aspirated, and the cells resuspended in electroporation buffer containing 1 mg/ml acetylated bovine serum albumin. The final cell suspension contains approximately 3×106 cells/ml. Electroporation should be performed immediately following resuspension.

[1067] Plasmid DNA is prepared according to standard techniques. For example, to construct a plasmid for targeting to the locus corresponding to the polynucleotide of the invention, plasmid pUC18 (MBI Fermentas, Amherst, N.Y.) is digested with HindIII. The CMV promoter is amplified by PCR with an XbaI site on the 5′ end and a BamHI site on the 3′end. Two non-coding sequences are amplified via PCR: one non-coding sequence (fragment 1) is amplified with a HindIII site at the 5′ end and an Xba site at the 3′end; the other non-coding sequence (fragment 2) is amplified with a BamHI site at the 5′end and a HindIII site at the 3′end. The CMV promoter and the fragments (1 and 2) are digested with the appropriate enzymes (CMV promoter—XbaI and BamHI; fragment 1-XbaI; fragment 2-BamHI) and ligated together. The resulting ligation product is digested with HindIII, and ligated with the HindIII-digested pUC18 plasmid.

[1068] Plasmid DNA is added to a sterile cuvette with a 0.4 cm electrode gap (Bio-Rad). The final DNA concentration is generally at least 120 μg/ml. 0.5 ml of the cell suspension (containing approximately 1.5.×106 cells) is then added to the cuvette, and the cell suspension and DNA solutions are gently mixed. Electroporation is performed with a Gene-Pulser apparatus (Bio-Rad). Capacitance and voltage are set at 960 μF and 250-300 V, respectively. As voltage increases, cell survival decreases, but the percentage of surviving cells that stably incorporate the introduced DNA into their genome increases dramatically. Given these parameters, a pulse time of approximately 14-20 mSec should be observed.

[1069] Electroporated cells are maintained at room temperature for approximately 5 min, and the contents of the cuvette are then gently removed with a sterile transfer pipette. The cells are added directly to 10 ml of prewarmed nutrient media (DMEM with 15% calf serum) in a 10 cm dish and incubated at 37 degree C. The following day, the media is aspirated and replaced with 10 ml of fresh media and incubated for a further 16-24 hours.

[1070] The engineered fibroblasts are then injected into the host, either alone or after having been grown to confluence on cytodex 3 microcarrier beads. The fibroblasts now produce the protein product. The fibroblasts can then be introduced into a patient as described above.

### Example 26

### Method of Treatment Using Gene Therapy—In Vivo

[1071] Another aspect of the present invention is using in vivo gene therapy methods to treat disorders, diseases and-conditions. The gene therapy method relates to the introduction of naked nucleic acid (DNA, RNA, and antisense DNA or RNA) sequences into an animal to increase or decrease the expression of the polypeptide. The polynucleotide of the present invention may be operatively linked to a promoter or any other genetic elements necessary for the expression of the polypeptide by the target tissue. Such gene therapy and delivery techniques and methods are known in the art, see, for example, WO90/11092, WO98/11779; U.S. Pat. Nos. 5,693,622, 5,705,151, 5,580,859; Tabata et al., Cardiovasc. Res. 35(3):470-479 (1997); Chao et al., Pharmacol. Res. 35(6):517-522 (1997); Wolff, Neuromuscul. Disord. 7(5):314-318 (1997); Schwartz et al., Gene Ther. 3(5):405-411 (1996); Tsurumi et al., Circulation 94(12):3281-3290 (1996) (incorporated herein by reference).

[1072] The polynucleotide constructs may be delivered by any method that delivers injectable materials to the cells of an animal, such as, injection into the interstitial space of tissues (heart, muscle, skin, lung, liver, intestine and the like). The polynucleotide constructs can be delivered in a pharmaceutically acceptable liquid or aqueous carrier.

[1073] The term “naked” polynucleotide, DNA or RNA, refers to sequences that are free from any delivery vehicle that acts to assist, promote, or facilitate entry into the cell, including viral sequences, viral particles, liposome formulations, lipofectin or precipitating agents and the like. However, the polynucleotides of the present invention may also be delivered in liposome formulations (such as those taught in Felgner P. L. et al. (1995) Ann. NY Acad. Sci. 772:126-139 and Abdallah B. et al. (1995) Biol. Cell 85(1):1-7) which can be prepared by methods well known to those skilled in the art.

[1074] The polynucleotide vector constructs used in the gene therapy method are preferably constructs that will not integrate into the host genome nor will they contain sequences that allow for replication. Any strong promoter known to those skilled in the art can be used for driving the expression of DNA. Unlike other gene therapies techniques, one major advantage of introducing naked nucleic acid sequences into target cells is the transitory nature of the polynucleotide synthesis in the cells. Studies have shown that non-replicating DNA sequences can be introduced into cells to provide production of the desired polypeptide for periods of up to six months.

[1075] The polynucleotide construct can be delivered to the interstitial space of tissues within the an animal, including of muscle, skin, brain, lung, liver, spleen, bone marrow, thymus, heart, lymph, blood, bone, cartilage, pancreas, kidney, gall bladder, stomach, intestine, testis, ovary, uterus, rectum, nervous system, eye, gland, and connective tissue. Interstitial space of the tissues comprises the intercellular fluid, mucopolysaccharide matrix among the reticular fibers of organ tissues, elastic fibers in the walls of vessels or chambers, collagen fibers of fibrous tissues, or that same matrix within connective tissue ensheathing muscle cells or in the lacunae of bone. It is similarly the space occupied by the plasma of the circulation and the lymph fluid of the lymphatic channels. Delivery to the interstitial space of muscle tissue is preferred for the reasons discussed below. They may be conveniently delivered by injection into the tissues comprising these cells. They are preferably delivered to and expressed in persistent, non-dividing cells which are differentiated, although delivery and expression may be achieved in non-differentiated or less completely differentiated cells, such as, for example, stem cells of blood or skin fibroblasts. In vivo muscle cells are particularly competent in their ability to take up and express polynucleotides.

[1076] For the naked polynucleotide injection, an effective dosage amount of DNA or RNA will be in the range of from about 0.05 g/kg body weight to about 50 mg/kg body weight. Preferably the dosage will be from about 0.005 mg/kg to about 20 mg/kg and more preferably from about 0.05 mg/kg to about 5 mg/kg. Of course, as the artisan of ordinary skill will appreciate, this dosage will vary according to the tissue site of injection. The appropriate and effective dosage of nucleic acid sequence can readily be determined by those of ordinary skill in the art and may depend on the condition being treated and the route of administration. The preferred route of administration is by the parenteral route of injection into the interstitial space of tissues. However, other parenteral routes may also be used, such as, inhalation of an aerosol formulation particularly for delivery to lungs or bronchial tissues, throat or mucous membranes of the nose. In addition, naked polynucleotide constructs can be delivered to arteries during angioplasty by the catheter used in the procedure.

[1077] The dose response effects of injected polynucleotide in muscle in vivo is determined as follows. Suitable template DNA for production of mRNA coding for polypeptide of the present invention is prepared in accordance with a standard recombinant DNA methodology. The template DNA, which may be either circular or linear, is either used as naked DNA or complexed with liposomes. The quadriceps muscles of mice are then injected with various amounts of the template DNA.

[1078] Five to six week old female and male Balb/C mice are anesthetized by intraperitoneal injection with 0.3 ml of 2.5% Avertin. A 1.5 cm incision is made on the anterior thigh, and the quadriceps muscle is directly visualized. The template DNA is injected in 0.1 ml of carrier in a 1 cc syringe through a 27 gauge needle over one minute, approximately 0.5 cm from the distal insertion site of the muscle into the knee and about 0.2 cm deep. A suture is placed over the injection site for future localization, and the skin is closed with stainless steel clips.

[1079] After an appropriate incubation time (e.g., 7 days) muscle extracts are prepared by excising the entire quadriceps. Every fifth 15 um cross-section of the individual quadriceps muscles is histochemically stained for protein expression. A time course for protein expression may be done in a similar fashion except that quadriceps from different mice are harvested at different times. Persistence of DNA in muscle following injection may be determined by Southern blot analysis after preparing total cellular DNA and HIRT supernatants from injected and control mice. The results of the above experimentation in mice can be use to extrapolate proper dosages and other treatment parameters in humans and other animals using naked DNA.

### Example 27

### Transgenic Animals

[1080] The polypeptides of the invention can also be expressed in transgenic animals. Animals of any species, including, but not limited to, mice, rats, rabbits, hamsters, guinea pigs, pigs, micro-pigs, goats, sheep, cows and non-human primates, e.g., baboons, monkeys, and chimpanzees may be used to generate transgenic animals. In a specific embodiment, techniques described herein or otherwise known in the art, are used to express polypeptides of the invention in humans, as part of a gene therapy protocol.

[1081] Any technique known in the art may be used to introduce the transgene (i.e., polynucleotides of the invention) into animals to produce the founder lines of transgenic animals. Such techniques include, but are not limited to, pronuclear microinjection (Paterson et al., Appl. Microbiol. Biotechnol. 40:691-698 (1994); Carver et al., Biotechnology (NY) 11:1263-1270 (1993); Wright et al., Biotechnology (NY) 9:830-834 (1991); and Hoppe et al., U.S. Pat. No. 4,873,191 (1989)); retrovirus mediated gene transfer into germ lines (Van der Putten et al., Proc. Natl. Acad. Sci., USA 82:6148-6152 (1985)), blastocysts or embryos; gene targeting in embryonic stem cells (Thompson et al., Cell 56:313-321 (1989)); electroporation of cells or embryos (Lo, 1983, Mol Cell. Biol. 3:1803-1814 (1983)); introduction of the polynucleotides of the invention using a gene gun (see, e.g., Ulmer et al., Science 259:1745 (1993); introducing nucleic acid constructs into embryonic pleuripotent stem cells and transferring the stem cells back into the blastocyst; and sperm-mediated gene transfer (Lavitrano et al., Cell 57:717-723 (1989); etc. For a review of such techniques, see Gordon, “Transgenic Animals” Intl. Rev. Cytol. 115:171-229 (1989), which is incorporated by reference herein in its entirety.

[1082] Any technique known in the art may be used to produce transgenic clones containing polynucleotides of the invention, for example, nuclear transfer into enucleated oocytes of nuclei from cultured embryonic, fetal, or adult cells induced to quiescence (Campell et al., Nature 380:64-66 (1996); Wilmut et al., Nature 385:810-813 (1997)).

[1083] The present invention provides for transgenic animals that carry the transgene in all their cells, as well as animals which carry the transgene in some, but not all their cells, i.e., mosaic animals or chimeric. The transgene may be integrated as a single transgene or as multiple copies such as in concatamers, e.g., head-to-head tandems or head-to-tail tandems. The transgene may also be selectively introduced into and activated in a particular cell type by following, for example, the teaching of Lasko et al. (Lasko et al., Proc. Natl. Acad. Sci. USA 89:6232-6236 (1992)). The regulatory sequences required for such a cell-type specific activation will depend upon the particular cell type of interest, and will be apparent to those of skill in the art. When it is desired that the polynucleotide transgene be integrated into the chromosomal site of the endogenous gene, gene targeting is preferred. Briefly, when such a technique is to be utilized, vectors containing some nucleotide sequences homologous to the endogenous gene are designed for the purpose of integrating, via homologous recombination with chromosomal sequences, into and disrupting the function of the nucleotide sequence of the endogenous gene. The transgene may also be selectively introduced into a particular cell type, thus inactivating the endogenous gene in only that cell type, by following, for example, the teaching of Gu et al. (Gu et al., Science 265:103-106 (1994)). The regulatory sequences required for such a cell-type specific inactivation will depend upon the particular cell type of interest, and will be apparent to those of skill in the art.

[1084] Once transgenic animals have been generated, the expression of the recombinant gene may be assayed utilizing standard techniques. Initial screening may be accomplished by Southern blot analysis or PCR techniques to analyze animal tissues to verify that integration of the transgene has taken place. The level of mRNA expression of the transgene in the tissues of the transgenic animals may also be assessed using techniques which include, but are not limited to, Northern blot analysis of tissue samples obtained from the animal, in situ hybridization analysis, and reverse transcriptase-PCR(RT-PCR). Samples of transgenic gene-expressing tissue may also be evaluated immunocytochemically or immunohistochemically using antibodies specific for the transgene product.

[1085] Once the founder animals are produced, they may be bred, inbred, outbred, or crossbred to produce colonies of the particular animal. Examples of such breeding strategies include, but are not limited to: outbreeding of founder animals with more than one integration site in order to establish separate lines; inbreeding of separate lines in order to produce compound transgenics that express the transgene at higher levels because of the effects of additive expression of each transgene; crossing of heterozygous transgenic animals to produce animals homozygous for a given integration site in order to both augment expression and eliminate the need for screening of animals by DNA analysis; crossing of separate homozygous lines to produce compound heterozygous or homozygous lines; and breeding to place the transgene on a distinct background that is appropriate for an experimental model of interest.

[1086] Transgenic animals of the invention have uses which include, but are not limited to, animal model systems useful in elaborating the biological function of polypeptides of the present invention, studying diseases, disorders, and/or conditions associated with aberrant expression, and in screening for compounds effective in ameliorating such diseases, disorders, and/or conditions.

### Example 28

### Knock-Out Animals

[1087] Endogenous gene expression can also be reduced by inactivating or “knocking out” the gene and/or its promoter using targeted homologous recombination. (E.g., see Smithies et al., Nature 317:230-234 (1985); Thomas & Capecchi, Cell 51:503-512 (1987); Thompson et al., Cell 5:313-321 (1989); each of which is incorporated by reference herein in its entirety). For example, a mutant, non-functional polynucleotide of the invention (or a completely unrelated DNA sequence) flanked by DNA homologous to the endogenous polynucleotide sequence (either the coding regions or regulatory regions of the gene) can be used, with or without a selectable marker and/or a negative selectable marker, to transfect cells that express polypeptides of the invention in vivo. In another embodiment, techniques known in the art are used to generate knockouts in cells that contain, but do not express the gene of interest. Insertion of the DNA construct, via targeted homologous recombination, results in inactivation of the targeted gene. Such approaches are particularly suited in research and agricultural fields where modifications to embryonic stem cells can be used to generate animal offspring with an inactive targeted gene (e.g., see Thomas & Capecchi 1987 and Thompson 1989, supra). However this approach can be routinely adapted for use in humans provided the recombinant DNA constructs are directly administered or targeted to the required site in vivo using appropriate viral vectors that will be apparent to those of skill in the art.

[1088] In further embodiments of the invention, cells that are genetically engineered to express the polypeptides of the invention, or alternatively, that are genetically engineered not to express the polypeptides of the invention (e.g., knockouts) are administered to a patient in vivo. Such cells may be obtained from the patient (i.e., animal, including human) or an MHC compatible donor and can include, but are not limited to fibroblasts, bone marrow cells, blood cells (e.g., lymphocytes), adipocytes, muscle cells, endothelial cells etc. The cells are genetically engineered in vitro using recombinant DNA techniques to introduce the coding sequence of polypeptides of the invention into the cells, or alternatively, to disrupt the coding sequence and/or endogenous regulatory sequence associated with the polypeptides of the invention, e.g., by transduction (using viral vectors, and preferably vectors that integrate the transgene into the cell genome) or transfection procedures, including, but not limited to, the use of plasmids, cosmids, YACs, naked DNA, electroporation, liposomes, etc. The coding sequence of the polypeptides of the invention can be placed under the control of a strong constitutive or inducible promoter or promoter/enhancer to achieve expression, and preferably secretion, of the polypeptides of the invention. The engineered cells which express and preferably secrete the polypeptides of the invention can be introduced into the patient systemically, e.g., in the circulation, or intraperitoneally.

[1089] Alternatively, the cells can be incorporated into a matrix and implanted in the body, e.g., genetically engineered fibroblasts can be implanted as part of a skin graft; genetically engineered endothelial cells can be implanted as part of a lymphatic or vascular graft. (See, for example, Anderson et al. U.S. Pat. No. 5,399,349; and Mulligan & Wilson, U.S. Pat. No. 5,460,959 each of which is incorporated by reference herein in its entirety).

[1090] When the cells to be administered are non-autologous or non-MHC compatible cells, they can be administered using well known techniques which prevent the development of a host immune response against the introduced cells. For example, the cells may be introduced in an encapsulated form which, while allowing for an exchange of components with the immediate extracellular environment, does not allow the introduced cells to be recognized by the host immune system.

[1091] Transgenic and “knock-out” animals of the invention have uses which include, but are not limited to, animal model systems useful in elaborating the biological function of polypeptides of the present invention, studying diseases, disorders, and/or conditions associated with aberrant expression, and in screening for compounds effective in ameliorating such diseases, disorders, and/or conditions.

### Example 29

### Method of Creating N- and C-terminal Deletion Mutants Corresponding to the OATP2 and cMOAT Polypeptides of the Present Invention

[1092] As described elsewhere herein, the present invention encompasses the creation of N- and C-terminal deletion mutants, in addition to any combination of N- and C-terminal deletions thereof, corresponding to the OATP2 and cMOAT polypeptides of the present invention. A number of methods are available to one skilled in the art for creating such mutants. Such methods may include a combination of PCR amplification and gene cloning methodology. Although one of skill in the art of molecular biology, through the use of the teachings provided or referenced herein, and/or otherwise known in the art as standard methods, could readily create each deletion mutant of the present invention, exemplary methods are described below.

[1093] Briefly, using the isolated cDNA clone encoding the full-length OATP2 (SNP ID:PS100s2) polypeptide sequence (as described in Example 4 and 5, for example), appropriate primers of about 15-25 nucleotides derived from the desired 5′ and 3′ positions of SEQ ID NO:7 may be designed to PCR amplify, and subsequently clone, the intended N- and/or C-terminal deletion mutant. Such primers could comprise, for example, an inititation and stop codon for the 5′ and 3′ primer, respectively. Such primers may also comprise restriction sites to facilitate cloning of the deletion mutant post amplification. Moreover, the primers may comprise additional sequences, such as, for example, flag-tag sequences, kozac sequences, or other sequences discussed and/or referenced herein.

[1094] For example, in the case of the P155 to c691 N-terminal deletion mutant, the following primers could be used to amplify a cDNA fragment corresponding to this deletion mutant:

| | | |
|---|---|---|
| 5′ Primer | 5′-GCAGCA GCGGCCGC ACTGAGATAGTGGGAAAAGG-3′ | (SEQ ID NO:607) |
| | [symbol] | |
| 3′ Primer | 5′-GCAGCA GTCGAC TTAACAATGTGTTTCACTATCTGCC-3′ | (SEQ ID NO:608) |
| | [symbol] | |

[1095] For example, in the case of the M1 to K600 C-terminal deletion mutant, the following primers could be used to amplify a cDNA fragment corresponding to this deletion mutant:

| | | |
|---|---|---|
| 5′ Primer | 5′-GCAGCA GCGGCCGC ATGGACCAAAATCAACATTTG-3′ | (SEQ ID NO:609) |
| | [symbol] | |
| 3′ Primer | 5′-GCAGCA GTCGAC TATACACGTTGTATCAATCAGAGCC-3′ | (SEQ ID NO:610) |
| | [symbol] | |

[1096] Representative PCR amplification conditions are provided below, although the skilled artisan would appreciate that other conditions may be required for efficient amplification. A 100 ul PCR reaction mixture may be prepared using 10 ng of the template DNA (cDNA clone of an OATP2 or cMOAT polypeptide described herein), 200 uM 4 dNTPs, 1 uM primers, 0.25 U Taq DNA polymerase (PE), and standard Taq DNA polymerase buffer. Typical PCR cycling condition are as follows:

| | |
|---|---|
| 20-25 cycles: | 45 sec, 93 degrees |
| | 2 min, 50 degrees |
| | 2 min, 72 degrees |
| 1 cycle: | 10 min, 72 degrees |

[1097] After the final extension step of PCR, 5 U Klenow Fragment may be added and incubated for 15 min at 30 degrees.

[1098] Upon digestion of the fragment with the NotI and SalI restriction enzymes, the fragment could be cloned into an appropriate expression and/or cloning vector which has been similarly digested (e.g., pSport1, among others). The skilled artisan would appreciate that other plasmids could be equally substituted, and may be desirable in certain circumstances. The digested fragment and vector are then ligated using a DNA ligase, and then used to transform competent E.coli cells using methods provided herein and/or otherwise known in the art.

[1099] The 5′ primer sequence for amplifying any additional N-terminal deletion mutants may be determined by reference to the following formula:

[1100] (S+(X*3)) to ((S+(X*3))+25), wherein ‘S’ is equal to the nucleotide position of the initiating start codon of the OATP2 (SNP ID:PS100s2) gene (SEQ ID NO:7), and ‘X’ is equal to the most N-terminal amino acid of the intended N-terminal deletion mutant. The first term will provide the start 5′ nucleotide position of the 5′ primer, while the second term will provide the end 3′ nucleotide position of the 5′ primer corresponding to sense strand of SEQ ID NO:7. Once the corresponding nucleotide positions of the primer are determined, the final nucleotide sequence may be created by the addition of applicable restriction site sequences to the 5′ end of the sequence, for example. As referenced herein, the addition of other sequences to the 5′ primer may be desired in certain circumstances (e.g., kozac sequences, etc.).

[1101] The 3′ primer sequence for amplifying any additional N-terminal deletion mutants may be determined by reference to the following formula:

[1102] (S+(X*3)) to ((S+(X*3))−25), wherein ‘S’ is equal to the nucleotide position of the initiating start codon of the OATP2 (SNP ID:PS100s2) gene (SEQ ID NO:7), and ‘X’ is equal to the most C-terminal amino acid of the intended N-terminal deletion mutant. The first term will provide the start 5′ nucleotide position of the 3′ primer, while the second term will provide the end 3′ nucleotide position of the 3′ primer corresponding to the anti-sense strand of SEQ ID NO:7. Once the corresponding nucleotide positions of the primer are determined, the final nucleotide sequence may be created by the addition of applicable restriction site sequences to the 5′ end of the sequence, for example. As referenced herein, the addition of other sequences to the 3′ primer may be desired in certain circumstances (e.g., stop codon sequences, etc.). The skilled artisan would appreciate that modifications of the above nucleotide positions may be necessary for optimizing PCR amplification.

[1103] The same general formulas provided above may be used in identifying the 5′ and 3′ primer sequences for amplifying any C-terminal deletion mutant of the present invention. Moreover, the same general formulas provided above may be used in identifying the 5′ and 3′ primer sequences for amplifying any combination of N-terminal and C-terminal deletion mutant of the present invention. The skilled artisan would appreciate that modifications of the above nucleotide positions may be necessary for optimizing PCR amplification.

### Example 30

### Additional Methods of Genotyping the SNPs of the Present Invention

[1104] The skilled artisan would acknowledge that there are a number of methods that may be employed for genotyping a SNP of the present invention, aside from the preferred methods described herein. The present invention encompasses the following non-limiting types of genotype assays: PCR-free genotyping methods, Single-step homogeneous methods, Homogeneous detection with fluorescence polarization, Pyrosequencing, “Tag” based DNA chip system, Bead-based methods, fluorescent dye chemistry, Mass spectrometry based genotyping assays, TaqMan genotype assays, Invader genotype assays, and microfluidic genotype assays, among others.

[1105] Specifically encompassed by the present invention are the following, non-limiting genotyping methods: Landegren, U., Nilsson, M. & Kwok, P. Genome Res 8, 769-776 (1998); Kwok, P., Pharmacogenomics 1, 95-100 (2000); Gut, I., Hum Mutat 17, 475-492 (2001); Whitcombe, D., Newton, C. & Little, S., Curr Opin Biotechnol 9, 602-608 (1998); Tillib, S. & Mirzabekov, A., Curr Opin Biotechnol 12, 53-58 (2001); Winzeler, E. et al., Science 281, 1194-1197 (1998); Lyamichev, V. et al., Nat Biotechnol 17, 292-296 (1999); Hall, J. et al., Proc Natl Acad Sci USA 97, 8272-8277 (2000); Mein, C. et al., Genome Res 10, 333-343 (2000); Ohnishi, Y. et al., J Hum Genet 46, 471-477 (2001); Nilsson, M. et al., Science 265, 2085-2088 (1994); Baner, J., Nilsson, M., Mendel-Hartvig, M. & Landegren, U., Nucleic Acids Res 26, 5073-5078 (1998); Baner, J. et al., Curr Opin Biotechnol 12, 11-15 (2001); Hatch, A., Sano, T., Misasi, J. & Smith, C., Genet Anal 15, 35-40 (1999); Lizardi, P. et al., Nat Genet 19, 225-232 (1998); Zhong, X., Lizardi, P., Huang, X., Bray-Ward, P. & Ward, D., Proc Natl Acad Sci USA 98, 3940-3945 (2001); Faruqi, F. et al. BMC Genomics 2, 4 (2001); Livak, K., Gnet Anal 14, 143-149 (1999); Marras, S., Kramer, F. & Tyagi, S., Genet Anal 14, 151-156 (1999); Ranade, K. et al., Genome Res 11, 1262-1268 (2001); Myakishev, M., Khripin, Y., Hu, S. & Hamer, D., Genome Re 11, 163-169 (2001); Beaudet, L., Bedard, J., Breton, B., Mercuri, R. & Budarf, M., Genome Res 11, 600r608 (2001); Chen, X., Levine, L. & P Y, K., Genome Res 9, 492-498 (1999); Gibson, N. et al., Clin Chem 43, 1336-1341 (1997); Latif, S., Bauer-Sardina, I., Ranade, K., Livak, K. & P Y, K., Genome Res 11, 436-440 (2001); Hsu, T., Law, S., Duan, S., Neri, B. & Kwok, P., Clin Chem 47, 1373-1377 (2001); Alderborn, A., Kristofferson, A. & Hammerling, U., Genome Res 10, 1249-1258 (2000); Ronaghi, M., Ublen, M. & Nyren, P., Science 281, 363, 365 (1998); Ronaghi, M., Genome Res 11, 3-11 (2001); Pease, A. et al., Proc Natl Acad Sci. USA 91, 5022-5026 (1994); Southern, E., Maskos, U. & Elder, J., Genomics 13, 1008-1017 (1993); Wang, D. et al., Science 280, 1077-1082 (1998); Brown, P. & Botstein, D., Nat Genet 21, 33-37 (1999); Cargill, M. et al. Nat Genet 22, 231-238 (1999); Dong, S. et al., Genome Res 11, 1418-1424 (2001); Halushka, M. et al., Nat Genet 22, 239-247 (1999); Hacia, J., Nat Genet 21, 42-47 (1999); Lipshutz, R., Fodor, S., Gingeras, T. & Lockhart, D., Nat Genet 21, 20-24 (1999); Sapolsky, R. et al., Genet Anal 14, 187-192 (1999); Tsuchihashi, Z. & Brown, P., J Virol 68, 5863 (1994); Herschlag, D., J Biol Chem 270, 20871-20874 (1995); Head, S. et al., Nucleic Acids Res 25, 5065-5071 (1997); Nikiforov, T. et al., Nucleic Acids Res 22, 4167-4175 (1994); Syvanen, A. et al., Genormics 12, 590-595 (1992); Shumaker, J., Metspalu, A. & Caskey, C., Hum Mutat 7, 346-354 (1996); Lindroos, K., Liljedahl, U., Raitio, M. & Syvanen, A., Nucleic Acids Res 29, E69-9 (2001); Lindblad-Toh, K. et al., Nat Genet 24, 381-386 (2000); Pastinen, T. et al., Genome Res 10, 1031-1042 (2000); Fan, J. et al., Genome Res 10, 853-860 (2000); Hirschhorn, J. et al., Proc Natl Acad Sci USA 97, 12164-12169 (2000); Bouchie, A., Nat Biotechnol 19, 704 (2001); Hensel, M. et al., Science 269, 400-403 (1995); Shoemaker, D., Lashkari, D., Morris, D., Mittmann, M. & Davis, R. Nat Genet 14, 450-456 (1996); Gerry, N. et al., J Mol Biol 292, 251-262 (1999); Ladner, D. et al., Lab Invest 81, 1079-1086 (2001); lannone, M. et al. Cytometry 39, 131-140 (2000); Fulton, R., McDade, R., Smith, P., Kienker, L. & Kettman, J. J., Clin Chem 43, 1749-1756 (1997); Armstrong, B., Stewart, M. & Mazumder, A., Cytometry 40, 102-108 (2000); Cai, H. et al., Genomics 69, 395 (2000); Chen, J. et al., Genome Res 10, 549-557 (2000); Ye, F. et al. Hum Mutat 17, 305-316 (2001); Michael, K., Taylor, L., Schultz, S. & Walt, D., Anal Chem 70, 1242-1248 (1998); Steemers, F., Ferguson, J. & Walt, D., Nat Biotechnol 18, 91-94 (2000); Chan, W. & Nie, S., Science 281, 2016-2018 (1998); Han, M., Gao, X., Su, J. & Nie, S., Nat Biotechnol 19, 631-635 (2001); Griffin, T. & Smith, L., Trends Biotechnol 18, 77-84 (2000); Jackson, P., Scholl, P. & Groopman, J., Mol Med Today 6, 271-276 (2000); Haff, L. & Smirnov, I., Genome Res 7, 378-388 (1997); Ross, P., Hall, L., Smirnov, I. & Haff, L., Nat Biotechnol 16, 1347-1351 (1998); Bray, M., Boerwinkle, E. & Doris, P. Hum Mutat 17, 296-304 (2001); Sauer, S. et al., Nucleic Acids Res 28, E13 (2000); Sauer, S. et al., Nucleic Acids Res 28, E100 (2000); Sun, X., Ding, H., Hung, K. & Guo, B., Nucleic Acids Res 28, E68 (2000); Tang, K. et al., Proc Natl Acad Sci USA 91, 10016-10020 (1999); Li, J. et al., Electrophoresis 20, 1258-1265 (1999); Little, D., Braun, A., O'Donnell, M. & Koster, H., Nat Med 3, 1413-1416 (1997); Little, D. et al. Anal Chem 69, 4540-4546 (1997); Griffin, T., Tang, W. & Smith, L., Nat Biotechnol 15, 1368-1372 (1997); Ross, P., Lee, K. & Belgrader, P., Anal Chem 69, 4197-4202 (1997); Jiang-Baucom, P., Girard, J., Butler, J. & Belgrader, P., Anal Chem 69, 4894-4898 (1997); Griffin, T., Hall, J., Prudent, J. & Smith, L., Proc Natl Acad Sci USA 96, 6301-6306 (1999); Kokoris, M. et al., Mol Diagn 5, 329-340 (2000); Jurinke, C., van den Boom, D., Cantor, C. & Koster, H. (2001); and/or Taranenko, N. et al., Genet Anal 13, 87-94 (1996).

[1106] It will be clear that the invention may be practiced otherwise than as particularly described in the foregoing description and examples. Numerous modifications and variations of the present invention are possible in light of the above teachings and, therefore, are within the scope of the appended claims.

[1107] The entire disclosure of each document cited (including patents, patent applications, journal articles, abstracts, laboratory manuals, books, or other disclosures) in the Background of the Invention, Detailed Description, and Examples is hereby incorporated herein by reference. Further, the hard copy of the sequence listing submitted herewith and the corresponding computer readable form are both incorporated herein by reference in their entireties.

[1108] While this invention has been particularly shown and described with references to preferred embodiments thereof, it will be understood by those skilled in the art that various changes in form and details may be made therein without departing from the scope of the invention encompassed by the appended claims.

TABLE III

| | Coriell | Total | | | | |
|---|---|---|---|---|---|---|
| Gene name | DNA Panel | SNPs | Missense | Silent | UTR | non-CDS |
| OATP2 | 24 | 36 | 5 | 4 | 0 | 27 |
| cMOAT | 24 | 33 | 6 | 7 | 0 | 20 |
| Total: | | 69 | 11 | 11 | 0 | 47 |

[1109] TABLE IV

| | | | CONTIG_{—} | CONTIG_{—} | |
|---|---|---|---|---|---|
| GENE_DESCRIPTION | HGNC_ID | SNP_ID | NUM | POS | FLANK SEQ (REF/ALT) |
| OATP2, solute carrier family 21 member 6 | SLC21A6 | PS100s1 | 4 | 208 | TTCAACATC(A/G)ACCTTATCC |
| OATP2, solute carrier family 21 member 6 | SLC21A6 | PS100s2 | 4 | 260 | AGAGCATCA(C/A)CTGAGATAG |
| OATP2, solute carrier family 21 member 6 | SLC21A6 | PS100s3 | 4 | 438 | TACACAGTT(C/T)GCCCATTAA |
| OATP2, solute carrier family 21 member 6 | SLC21A6 | PS100s4 | 4 | 443 | AGTTCGCCC(T/A)TTAACAACA |
| OATP2, solute carrier family 21 member 6 | SLC21A6 | PS100s5 | 4 | 467 | TTAAACTAC(A/G)CGTTTTCAC |
| OATP2, solute carrier family 21 member 6 | SLC21A6 | PS100s6 | 4 | 469 | AAACTACGC(G/A)TTTTCACTT |
| OATP2, solute carrier family 21 member 6 | SLC21A6 | PS100s7 | 8 | 197 | AACTGTAGG(C/T)AGAAAAAA |
| OATP2, solute carrier family 21 member 6 | SLC21A6 | PS100s8 | 9 | 214 | TAATCTTA(C/A)CTTTTCCCA |
| OATP2, solute carrier family 21 member 6 | SLC21A6 | PS100s9 | 9 | 308 | TGATGAAT(C/T)GATATTAGT |
| OATP2, solute carrier family 21 member 6 | SLC21A6 | PS100s10 | 11 | 255 | TAAGAAA(T/A)TTTCACGG |
| OATP2, solute carrier family 21 member 6 | SLC21A6 | PS100s11 | 11 | 264 | TTTCACGG(G/A)AGAAGATT |
| OATP2, solute carrier family 21 member 6 | SLC21A6 | PS100s12 | 12 | 223 | ATTATTTTT(C/T)CTTTGACT |
| OATP2, solute carrier family 21 member 6 | SLC21A6 | PS100s13 | 13 | 345 | TGAAGCAT(A/G)TATTGAAAT |
| OATP2, solute carrier family 21 member 6 | SLC21A6 | PS100s14 | 13 | 420 | TCTTTGGC(A/G)AAATTTTTG |
| OATP2, solute carrier family 21 member 6 | SLC21A6 | PS100s15 | 13 | 430 | AAATTTTTG(A/T)TGCTTAATA |
| OATP2, solute carrier family 21 member 6 | SLC21A6 | PS100s16 | 13 | 434 | TTTTGATGC(C/T)TAATAGTTT |
| OATP2, solute carrier family 21 member 6 | SLC21A6 | PS100s17 | 13 | 435 | TTTGATGCT(A/T)AATAGTTTA |
| OATP2, solute carrier family 21 member 6 | SLC21A6 | PS100s18 | 13 | 475 | TATTTTGAT(G/A)GCTTCTCTT |
| OATP2, solute carrier family 21 member 6 | SLC21A6 | PS100s19 | 14 | 255 | TCAACTGGG(G/A)TAAATGTAT |
| OATP2, solute carrier family 21 member 6 | SLC21A6 | PS100s20 | 14 | 261 | GGGGTAAAT(G/T)TATCTCTCA |
| OATP2, solute carrier family 21 member 6 | SLC21A6 | PS100s21 | 14 | 396 | CTATAATGC(A/G)CAAAGAATG |
| OATP2, solute carrier family 21 member 6 | SLC21A6 | PS100s22 | 14 | 425 | AAATGTTGA(C/T)AGTGAGGAT |
| OATP2, solute carrier family 21 member 6 | SLC21A6 | PS100s23 | 16 | 244 | GATTTGCAA(C/G)CTGCTAGAC |
| OATP2, solute carrier family 21 member 6 | SLC21A6 | PS100s24 | 16 | 394 | GATAGA(C/G)ATATATCA |
| OATP2, solute carrier family 21 member 6 | SLC21A6 | PS100s25 | 17 | 133 | CAATGACAT(T/C)ACAGCAGT |
| OATP2, solute carrier family 21 member 6 | SLC21A6 | PS100s26 | 17 | 181 | GTTCAGTTT(C/G)AATTTTTTA |
| OATP2, solute carrier family 21 member 6 | SLC21A6 | PS100s27 | 17 | 380 | AGTTCTGGG(A/G)TACATGTG |
| OATP2, solute carrier family 21 member 6 | SLC21A6 | PS100s28 | 18 | 251 | ATGCATGA(C/G)ACTATAA |
| OATP2, solute carrier family 21 member 6 | SLC21A6 | PS100s29 | 19 | 75 | GGATATATG(T/C)GTTCATGGG |
| OATP2, solute carrier family 21 member 6 | SLC21A6 | PS100s30 | 19 | 125 | ATAGTACCA(T/C)TGGGGCTTT |
| OATP2, solute carrier family 21 member 6 | SLC21A6 | PS100s31 | 19 | 151 | TGATGATTT(C/T)GCTAAAGAA |
| OATP2, solute carrier family 21 member 6 | SLC21A6 | PS100s32 | 19 | 513 | CCATGATAA(C/T)GTCTTTCTA |
| OATP2, solute carrier family 21 member 6 | SLC21A6 | PS100s33 | 20 | 156 | TGTAGCATA(C/T)ATCCAAGCT |
| OATP2, solute carrier family 21 member 6 | SLC21A6 | PS100s34 | 20 | 170 | AAGCTAGAC(G/T)TCAGGGCCTT |
| OATP2, solute carrier family 21 member 6 | SLC21A6 | PS100s35 | 20 | 180 | TCAGGCCTT(A/C)GTATTATA |
| OATP2, solute carrier family 21 member 6 | SLC21A6 | PS100s36 | 20 | 291 | CCTGTATGA(C/T)ACTCATTTG |
| cMOAT, ATP-binding cassette sub-family C member 2 | ABCC2 | PS101s1 | 4 | 284 | ACAATGAGG(A/T)GAGGATTGA |
| cMOAT, ATP-binding cassette sub-family C member 2 | ABCC2 | PS101s2 | 6 | 213 | TTGTGACAT(T/C)GGTAGCATG |
| cMOAT, ATP-binding cassette sub-family C member 2 | ABCC2 | PS101s3 | 7 | 53 | AGTAAGTT(C/G)TAGAGCTCA |
| cMOAT, ATP-binding cassette sub-family C member 2 | ABCC2 | PS101s4 | 7 | 100 | AGGTCGTG(G/A)AGCCCAATG |
| cMOAT, ATP-binding cassette sub-family C member 2 | ABCC2 | PS101s5 | 7 | 148 | TGACCACC(A/G)GCAGCCTC |
| cMOAT, ATP-binding cassette sub-family C member 2 | ABCC2 | PS101s6 | 9 | 112 | GATCTAGA(G/A)ACAGACAA |
| cMOAT, ATP-binding cassette sub-family C member 2 | ABCC2 | PS101s7 | 9 | 190 | CAGGCTGCA(C/T)ACCATCATG |
| cMOAT, ATP-binding cassette sub-family C member 2 | ABCC2 | PS101s8 | 9 | 222 | GAGTGTAGG(A/G)GGACAGGGC |
| cMOAT, ATP-binding cassette sub-family C member 2 | ABCC2 | PS101s9 | 9 | 284 | GCCGGGAAA(C/T)ACCTGATGG |
| cMOAT, ATP-binding cassette sub-family C member 2 | ABCC2 | PS101s10 | 13 | 264 | CCAGCAGC(T/G)ATTTTCTGA |
| cMOAT, ATP-binding cassette sub-family C member 2 | ABCC2 | PS101s11 | 15 | 192 | ACTGGAA(A/G)GGTGAAC |
| cMOAT, ATP-binding cassette sub-family C member 2 | ABCC2 | PS101s12 | 15 | 204 | AACACCA(T/C)ACAGAA |
| cMOAT, ATP-binding cassette sub-family C member 2 | ABCC2 | PS101s13 | 16 | 859 | TCTGTGAG(C/T)ACAAGGGC |
| cMOAT, ATP-binding cassette sub-family C member 2 | ABCC2 | PS101s14 | 17 | 387 | AAGCAGCAT(A/T)GTGCTAAGT |
| cMOAT, ATP-binding cassette sub-family C member 2 | ABCC2 | PS101s15 | 18 | 86 | AGGGGCTGA(G/A)AACCTTTGC |
| cMOAT, ATP-binding cassette sub-family C member 2 | ABCC2 | PS101s16 | 18 | 172 | CCCCATG(C/A)ATTCTATTA |
| cMOAT, ATP-binding cassette sub-family C member 2 | ABCC2 | PS101s17 | 19 | 345 | TAGATC(C/T)CTGTCAG |
| cMOAT, ATP-binding cassette sub-family C member 2 | ABCC2 | PS101s18 | 19 | 367 | TGAACAAGG(A/G)GAGAGAAGC |
| cMOAT, ATP-binding cassette sub-family C member 2 | ABCC2 | PS101s19 | 20 | 281 | AGAGTCTT(T/C)GTTCCAGAC |
| cMOAT, ATP-binding cassette sub-family C member 2 | ABCC2 | PS101s20 | 21 | 243 | TTCTGTGCC(C/T)ATGATGATT |
| cMOAT, ATP-binding cassette sub-family C member 2 | ABCC2 | PS101s21 | 25 | 285 | CCCCATGCC(A/G)CTTTTCCTC |
| cMOAT, ATP-binding cassette sub-family C member 2 | ABCC2 | PS101s22 | 29 | 136 | ACAGGGCCT(G/A)TCACAGCCA |
| cMOAT, ATP-binding cassette sub-family C member 2 | ABCC2 | PS101s23 | 30 | 545 | TTCTCCAA(C/T)GGTGTACTC |
| cMOAT, ATP-binding cassette sub-family C member 2 | ABCC2 | PS101s24 | 30 | 575 | AGTTGGATA(A/G)GGTCAATGC |
| cMOAT, ATP-binding cassette sub-family C member 2 | ABCC2 | PS101s25 | 31 | 132 | AGCCTGGGG(G/T)TCTCAGCCT |
| cMOAT, ATP-binding cassette sub-family C member 2 | ABCC2 | PS101s26 | 33 | 27 | CTCCTGGGT(G/A)TGTCAACAT |
| cMOAT, ATP-binding cassette sub-family C member 2 | ABCC2 | PS101s27 | 33 | 54 | ATGGCAAAG(A/C)TGCTGAGGG |
| cMOAT, ATP-binding cassette sub-family C member 2 | ABCC2 | PS101s28 | 33 | 63 | CTGCTGAGG(A/G)GAGGAGTGA |
| cMOAT, ATP-binding cassette sub-family C member 2 | ABCC2 | PS101s29 | 34 | 615 | ACTAACCGA(A/G)GACTGAGGG |
| cMOAT, ATP-binding cassette sub-family C member 2 | ABCC2 | PS101s30 | 35 | 650 | TGGTAAA(C/T)CAATATCTA |
| cMOAT, ATP-binding cassette sub-family C member 2 | ABCC2 | PS101s31 | 35 | 742 | GGGTTCTGT(G/C)TCTCTTTGA |
| cMOAT, ATP-binding cassette sub-family C member 2 | ABCC2 | PS101s32 | 36 | 164 | ATTGTTTTC(G/A)ATATTCTTC |
| cMOAT, ATP-binding cassette sub-family C member 2 | ABCC2 | PS101s33 | 36 | 690 | TCTTTCTGA(C/T)AGGGAGGA |

| | FLANK_{—} | FLANK_{—} | | REF_{—} | | | |
|---|---|---|---|---|---|---|---|
| | SEQ REF | SEQ ALT | | SEQ_{—} | | ALT_{—} | |
| GENE_DESCRIPTION | (SEQ ID NO) | (SEQ ID NO) | REF_SEQ_ID | POS | REF_NT | NT | EXON |
| OATP2, solute carrier family 21 member 6 | 51 | 120 | AC022335 8 | 82621 | C | T | Exon5 |
| OATP2, solute carrier family 21 member 6 | 52 | 121 | AC022335 8 | 82569 | G | T | Exon5 |
| OATP2, solute carrier family 21 member 6 | 53 | 122 | AC022335 8 | 82391 | G | A | Intron5 |
| OATP2, solute carrier family 21 member 6 | 54 | 123 | AC022335 8 | 82386 | T | A | Intron5 |
| OATP2, solute carrier family 21 member 6 | 55 | 124 | AC022335 8 | 82362 | C | T | Intron5 |
| OATP2, solute carrier family 21 member 6 | 56 | 125 | AC022335 8 | 82360 | C | T | Intron5 |
| OATP2, solute carrier family 21 member 6 | 57 | 126 | AC022335 8 | 20092 | A | G | Exon15 |
| OATP2, solute carrier family 21 member 6 | 58 | 127 | AC022335 8 | 82550 | C | A | Intron5 |
| OATP2, solute carrier family 21 member 6 | 59 | 128 | AC022335 8 | 82644 | T | C | Exon5 |
| OATP2, solute carrier family 21 member 6 | 60 | 129 | AC022335 8 | 128161 | A | T | Intron1 |
| OATP2, solute carrier family 21 member 6 | 61 | 130 | AC022335 8 | 128152 | T | C | Intron1 |
| OATP2, solute carrier family 21 member 6 | 62 | 131 | AC022335 8 | 34576 | A | G | Intron14 |
| OATP2, solute carrier family 21 member 6 | 63 | 132 | AC022335 8 | 117672 | T | C | Intron2 |
| OATP2, solute carrier family 21 member 6 | 64 | 133 | AC022335 8 | 117597 | C | T | Intron2 |
| OATP2, solute carrier family 21 member 6 | 65 | 134 | AC022335 8 | 117587 | T | A | Intron2 |
| OATP2, solute carrier family 21 member 6 | 66 | 135 | AC022335 8 | 117583 | A | G | Intron2 |
| OATP2, solute carrier family 21 member 6 | 67 | 136 | AC022335 8 | 117582 | A | T | Intron2 |
| OATP2, solute carrier family 21 member 6 | 68 | 137 | AC022335 8 | 117542 | T | C | Intron2 |
| OATP2, solute carrier family 21 member 6 | 69 | 138 | AC022335 8 | 86574 | C | T | Intron3 |
| OATP2, solute carrier family 21 member 6 | 70 | 139 | AC022335 8 | 86588 | A | C | Intron3 |
| OATP2, solute carrier family 21 member 6 | 71 | 140 | AC022335 8 | 86433 | T | C | Intron3 |
| OATP2, solute carrier family 21 member 6 | 72 | 141 | AC022335 8 | 86404 | A | G | Intron3 |
| OATP2, solute carrier family 21 member 6 | 73 | 142 | AC022335 8 | 53449 | C | G | Exon11 |
| OATP2, solute carrier family 21 member 6 | 74 | 143 | AC022335 8 | 53599 | C | G | Intron10 |
| OATP2, solute carrier family 21 member 6 | 75 | 144 | AC022335 8 | 56845 | C | T | Exon10 |
| OATP2, solute carrier family 21 member 6 | 76 | 145 | AC022335 8 | 56893 | G | C | Exon10 |
| OATP2, solute carrier family 21 member 6 | 77 | 146 | AC022335 8 | 57092 | A | G | Intron9 |
| OATP2, solute carrier family 21 member 6 | 78 | 147 | AC022335 8 | 42107 | C | G | Intron12 |
| OATP2, solute carrier family 21 member 6 | 79 | 148 | AC022335 8 | 80833 | A | G | Exon6 |
| OATP2, solute carrier family 21 member 6 | 80 | 149 | AC022335 8 | 80783 | A | G | Exon6 |
| OATP2, solute carrier family 21 member 6 | 81 | 150 | AC022335 8 | 80757 | G | A | Exon6 |
| OATP2, solute carrier family 21 member 6 | 82 | 151 | AC022335 8 | 80395 | G | A | Intron7 |
| OATP2, solute carrier family 21 member 6 | 83 | 152 | AC022335 8 | 19796 | T | C | Exon15 |
| OATP2, solute carrier family 21 member 6 | 84 | 153 | AC022335 8 | 19810 | T | G | Exon15 |
| OATP2, solute carrier family 21 member 6 | 85 | 154 | AC022335 8 | 19820 | A | C | Exon15 |
| OATP2, solute carrier family 21 member 6 | 86 | 155 | AC022335 8 | 19931 | T | C | Exon15 |
| cMOAT, ATP-binding cassette sub-family C member 2 | 87 | 156 | AL392107 4 | 66274 | A | T | Exon25 |
| cMOAT, ATP-binding cassette sub-family C member 2 | 88 | 157 | AL392107 4 | 58303 | G | A | Exon28 |
| cMOAT, ATP-binding cassette sub-family C member 2 | 89 | 158 | AL392107 4 | 56960 | C | G | Intron29 |
| cMOAT, ATP-binding cassette sub-family C member 2 | 90 | 159 | AL392107 4 | 57007 | G | A | Exon29 |
| cMOAT, ATP-binding cassette sub-family C member 2 | 91 | 160 | AL392107 4 | 57055 | G | A | Exon29 |
| cMOAT, ATP-binding cassette sub-family C member 2 | 92 | 161 | AL392107 4 | 52055 | C | T | Exon31 |
| cMOAT, ATP-binding cassette sub-family C member 2 | 93 | 162 | AL392107 4 | 51977 | G | A | Exon31 |
| cMOAT, ATP-binding cassette sub-family C member 2 | 94 | 163 | AL392107 4 | 51945 | C | T | Intron31 |
| cMOAT, ATP-binding cassette sub-family C member 2 | 95 | 164 | AL392107 4 | 51883 | G | A | Intron31 |
| cMOAT, ATP-binding cassette sub-family C member 2 | 96 | 165 | AL392107 4 | 66295 | C | A | Exon25 |
| cMOAT, ATP-binding cassette sub-family C member 2 | 97 | 166 | AL392107 4 | 71663 | T | C | Exon21 |
| cMOAT, ATP-binding cassette sub-family C member 2 | 98 | 167 | AL392107 4 | 71651 | G | A | Intron21 |
| cMOAT, ATP-binding cassette sub-family C member 2 | 99 | 168 | AL392107 4 | 110259 | T | C | Exon3 |
| cMOAT, ATP-binding cassette sub-family C member 2 | 100 | 169 | AL392107 4 | 94484 | T | A | Intron12 |
| cMOAT, ATP-binding cassette sub-family C member 2 | 101 | 170 | AL392107 4 | 90742 | G | A | Intron15 |
| cMOAT, ATP-binding cassette sub-family C member 2 | 102 | 171 | AL392107 4 | 90828 | C | A | Intron15 |
| cMOAT, ATP-binding cassette sub-family C member 2 | 103 | 172 | AL392107 4 | 72250 | C | T | Intron19 |
| cMOAT, ATP-binding cassette sub-family C member 2 | 104 | 173 | AL392107 4 | 72272 | A | G | Intron19 |
| cMOAT, ATP-binding cassette sub-family C member 2 | 105 | 174 | AL392107 4 | 119722 | G | A | Exon1 |
| cMOAT, ATP-binding cassette sub-family C member 2 | 106 | 175 | AL392107 4 | 58988 | A | G | Intron26 |
| cMOAT, ATP-binding cassette sub-family C member 2 | 107 | 176 | AL392107 4 | 94844 | C | T | Intron12 |
| cMOAT, ATP-binding cassette sub-family C member 2 | 108 | 177 | AL392107 4 | 89454 | A | G | Exon16 |
| cMOAT, ATP-binding cassette sub-family C member 2 | 109 | 178 | AL392107 4 | 98465 | C | T | Exon10 |
| cMOAT, ATP-binding cassette sub-family C member 2 | 110 | 179 | AL392107 4 | 98495 | G | A | Exon10 |
| cMOAT, ATP-binding cassette sub-family C member 2 | 111 | 180 | AL392107 4 | 105455 | C | A | Intron6 |
| cMOAT, ATP-binding cassette sub-family C member 2 | 112 | 181 | AL392107 4 | 67834 | A | G | Intron24 |
| cMOAT, ATP-binding cassette sub-family C member 2 | 113 | 182 | AL392107 4 | 67861 | C | A | Intron24 |
| cMOAT, ATP-binding cassette sub-family C member 2 | 114 | 183 | AL392107 4 | 67870 | G | A | Intron24 |
| cMOAT, ATP-binding cassette sub-family C member 2 | 115 | 184 | AL392107 4 | 109039 | A | G | Intron3 |
| cMOAT, ATP-binding cassette sub-family C member 2 | 116 | 185 | AL392107 4 | 83188 | A | G | Intron19 |
| cMOAT, ATP-binding cassette sub-family C member 2 | 117 | 186 | AL392107 4 | 83096 | C | G | Intron19 |
| cMOAT, ATP-binding cassette sub-family C member 2 | 118 | 187 | AL392107 4 | 70852 | C | T | Exon22 |
| cMOAT, ATP-binding cassette sub-family C member 2 | 119 | 188 | AL392107 4 | 70326 | A | G | Intron23 |

| | | REV_{—} | REF_{—} | ALT_{—} | CDNA_SEQ_{—} | |
|---|---|---|---|---|---|---|
| GENE_DESCRIPTION | MUTATION TYPE | COMP | CODON | CODON | ID | CDNA_SEQ_POS |
| OATP2, solute carrier family 21 member 6 | Silent | 1 | TCG | TCA | AF205071 1 | 545 |
| OATP2, solute carrier family 21 member 6 | Missense | 1 | CCT | ACT | AF205071 1 | 597 |
| OATP2, solute carrier family 21 member 6 | Non-CDS | 1 | | | AF205071 1 | |
| OATP2, solute carrier family 21 member 6 | Non-CDS | 1 | | | AF205071 1 | |
| OATP2, solute carrier family 21 member 6 | Non-CDS | 1 | | | AF205071 1 | |
| OATP2, solute carrier family 21 member 6 | Non-CDS | 1 | | | AF205071 1 | |
| OATP2, solute carrier family 21 member 6 | Non-CDS | 1 | | | AF205071 1 | 2377 |
| OATP2, solute carrier family 21 member 6 | Non-CDS | 1 | | | AF205071 1 | |
| OATP2, solute carrier family 21 member 6 | Missense | 1 | GAT | TAT | AF205071 1 | 522 |
| OATP2, solute carrier family 21 member 6 | Non-CDS | 1 | | | AF205071 1 | |
| OATP2, solute carrier family 21 member 6 | Non-CDS | 1 | | | AF205071 1 | |
| OATP2, solute carrier family 21 member 6 | Non-CDS | 1 | | | AF205071 1 | |
| OATP2, solute carrier family 21 member 6 | Non-CDS | 1 | | | AF205071 1 | |
| OATP2, solute carrier family 21 member 6 | Non-CDS | 1 | | | AF205071 1 | |
| OATP2, solute carrier family 21 member 6 | Non-CDS | 1 | | | AF205071 1 | |
| OATP2, solute carrier family 21 member 6 | Non-CDS | 1 | | | AF205071 1 | |
| OATP2, solute carrier family 21 member 6 | Non-CDS | 1 | | | AF205071 1 | |
| OATP2, solute carrier family 21 member 6 | Non-CDS | 1 | | | AF205071 1 | |
| OATP2, solute carrier family 21 member 6 | Non-CDS | 1 | | | AF205071 1 | |
| OATP2, solute carrier family 21 member 6 | Non-CDS | 1 | | | AF205071 1 | |
| OATP2, solute carrier family 21 member 6 | Non-CDS | 1 | | | AF205071 1 | |
| OATP2, solute carrier family 21 member 6 | Non-CDS | 1 | | | AF205071 1 | |
| OATP2, solute carrier family 21 member 6 | Missense | 1 | GGT | GCT | AF205071 1 | 1597 |
| OATP2, solute carrier family 21 member 6 | Non-CDS | 1 | | | AF205071 1 | |
| OATP2, solute carrier family 21 member 6 | Silent | 1 | GTG | GTA | AF205071 1 | 1382 |
| OATP2, solute carrier family 21 member 6 | Missense | 1 | TTC | TTG | AF205071 1 | 1334 |
| OATP2, solute carrier family 21 member 6 | Non-CDS | 1 | | | AF205071 1 | |
| OATP2, solute carrier family 21 member 6 | Non-CDS | 1 | | | AF205071 1 | |
| OATP2, solute carrier family 21 member 6 | Missense | 1 | GTG | GCG | AF205071 1 | 655 |
| OATP2, solute carrier family 21 member 6 | Silent | 1 | TTG | CTG | AF205071 1 | 705 |
| OATP2, solute carrier family 21 member 6 | Silent | 1 | TTC | TTT | AF205071 1 | 731 |
| OATP2, solute carrier family 21 member 6 | Non-CDS | 1 | | | AF205071 1 | |
| OATP2, solute carrier family 21 member 6 | Non-CDS | 1 | | | AF205071 1 | 2673 |
| OATP2, solute carrier family 21 member 6 | Non-CDS | 1 | | | AF205071 1 | 2659 |
| OATP2, solute carrier family 21 member 6 | Non-CDS | 1 | | | AF205071 1 | 2649 |
| OATP2, solute carrier family 21 member 6 | Non-CDS | 1 | | | AF205071 1 | 2538 |
| cMOAT, ATP-binding cassette sub-family C member 2 | Missense | 1 | GAG | GTG | U49248 1 | 3664 |
| cMOAT, ATP-binding cassette sub-family C member 2 | Silent | 1 | ATC | ATT | U49248 1 | 4073 |
| cMOAT, ATP-binding cassette sub-family C member 2 | Non-CDS | 1 | | | U49248 1 | |
| cMOAT, ATP-binding cassette sub-family C member 2 | Silent | 1 | CTC | CTT | U49248 1 | 4211 |
| cMOAT, ATP-binding cassette sub-family C member 2 | Silent | 1 | GCC | GCT | U49248 1 | 4163 |
| cMOAT, ATP-binding cassette sub-family C member 2 | Silent | 1 | GAG | GAA | U49248 1 | 4511 |
| cMOAT, ATP-binding cassette sub-family C member 2 | Silent | 1 | CAT | CAC | U49248 1 | 4589 |
| cMOAT, ATP-binding cassette sub-family C member 2 | Non-CDS | 1 | | | U49248 1 | |
| cMOAT, ATP-binding cassette sub-family C member 2 | Non-CDS | 1 | | | U49248 1 | |
| cMOAT, ATP-binding cassette sub-family C member 2 | Missense | 1 | CGA | CTA | U49248 1 | 3643 |
| cMOAT, ATP-binding cassette sub-family C member 2 | Missense | 1 | AAG | AGG | U49248 1 | 2983 |
| cMOAT, ATP-binding cassette sub-family C member 2 | Non-CDS | 1 | | | U49248 1 | |
| cMOAT, ATP-binding cassette sub-family C member 2 | Silent | 1 | GTA | GTG | U49248 1 | 359 |
| cMOAT, ATP-binding cassette sub-family C member 2 | Non-CDS | 1 | | | U49248 1 | |
| cMOAT, ATP-binding cassette sub-family C member 2 | Non-CDS | 1 | | | U49248 1 | |
| cMOAT, ATP-binding cassette sub-family C member 2 | Non-CDS | 1 | | | U49248 1 | |
| cMOAT, ATP-binding cassette sub-family C member 2 | Non-CDS | 1 | | | U49248 1 | |
| cMOAT, ATP-binding cassette sub-family C member 2 | Non-CDS | 1 | | | U49248 1 | |
| cMOAT, ATP-binding cassette sub-family C member 2 | Non-CDS | 1 | | | U49248 1 | 78 |
| cMOAT, ATP-binding cassette sub-family C member 2 | Non-CDS | 1 | | | U49248 1 | |
| cMOAT, ATP-binding cassette sub-family C member 2 | Non-CDS | 1 | | | U49248 1 | |
| cMOAT, ATP-binding cassette sub-family C member 2 | Missense | 1 | ATA | ACA | U49248 1 | 2110 |
| cMOAT, ATP-binding cassette sub-family C member 2 | Missense | 1 | GTT | ATT | U49248 1 | 1350 |
| cMOAT, ATP-binding cassette sub-family C member 2 | Missense | 1 | CTA | TTA | U49248 1 | 1320 |
| cMOAT, ATP-binding cassette sub-family C member 2 | Non-CDS | 1 | | | U49248 1 | |
| cMOAT, ATP-binding cassette sub-family C member 2 | Non-CDS | 1 | | | U49248 1 | |
| cMOAT, ATP-binding cassette sub-family C member 2 | Non-CDS | 1 | | | U49248 1 | |
| cMOAT, ATP-binding cassette sub-family C member 2 | Non-CDS | 1 | | | U49248 1 | |
| cMOAT, ATP-binding cassette sub-family C member 2 | Non-CDS | 1 | | | U49248 1 | |
| cMOAT, ATP-binding cassette sub-family C member 2 | Non-CDS | 1 | | | U49248 1 | |
| cMOAT, ATP-binding cassette sub-family C member 2 | Non-CDS | 1 | | | U49248 1 | |
| cMOAT, ATP-binding cassette sub-family C member 2 | Silent | 1 | TCG | TCA | U49248 1 | 3035 |
| cMOAT, ATP-binding cassette sub-family C member 2 | Non-CDS | 1 | | | U49248 1 | |

[1110] TABLE V

| | | | | | | | REFSEQ_{—} |
|---|---|---|---|---|---|---|---|
| | | | | | | | FLANK |
| | | | | | REFSEQ_{—} | | REF |
| | | | CONTIG_{—} | CONTIG_{—} | FLANK_{—} | | (SEQ |
| GENE_DESCRIPTION | HGNC_ID | SNP_ID | NUM | POS | ORIENT | REFSEC FLANK | ID NO) |
| OATP2, solute carrier family 21 member 6 | SLC21A6 | PS100s1 | 4 | 208 | 1 | ATTAAACAAGTGGATAAGGT(C/T)GATGTTGAATTTTCTGATGA | 189 |
| OATP2, solute carrier family 21 member 6 | SLC21A6 | PS100s2 | 4 | 260 | 1 | ACCTTTTCCCACTATCTCAG(G/T)TGATGCTCTATTGAGTGATA | 190 |
| OATP2, solute carrier family 21 member 6 | SLC21A6 | PS100s3 | 4 | 438 | 1 | AACCTGTGTTGTTAATGGGC(G/A)AACTGTGTATATTAACACTA | 191 |
| OATP2, solute carrier family 21 member 6 | SLC21A6 | PS100s4 | 4 | 443 | 1 | GTTTAAACCTGTGTTGTTAA(T/A)GGGCGAACTGTGTATATTAA | 192 |
| OATP2, solute carrier family 21 member 6 | SLC21A6 | PS100s5 | 4 | 467 | 1 | TTTGCATAGAAGTGAAAACG(C/T)GTAGTTTAAACCTGTGTTGT | 193 |
| OATP2, solute carrier family 21 member 6 | SLC21A6 | PS100s6 | 4 | 469 | 1 | AATTTGCATAGAAGTGAAAA(C/T)GCGTAGTTTAAACCTGTGTT | 194 |
| OATP2, solute carrier family 21 member 6 | SLC21A6 | PS100s7 | 8 | 197 | 1 | TGAGTACTCTCATTTTTTCT(A/G)CCTACAGTTTGTTTTATTAT | 195 |
| OATP2, solute carrier family 21 member 6 | SLC21A6 | PS100s8 | 9 | 214 | 0 | ACTGTCAATATTAATTCTTA(C/A)CTTTTCCCACTATCTCAGGT | 196 |
| OATP2, solute carrier family 21 member 6 | SLC21A6 | PS100s9 | 9 | 308 | 0 | TGTTGAATTTTCTGATGAAT(T/C)GATATTAGTTTCTTTAGAAT | 197 |
| OATP2, solute carrier family 21 member 6 | SLC21A6 | PS100s10 | 11 | 255 | 1 | CAAAATCTTCTTCCGTGAAA(A/T)TTTCTTACATAAAATATAG | 198 |
| OATP2, solute carrier family 21 member 6 | SLC21A6 | PS100s11 | 11 | 264 | 1 | CAAGACCATCAAAATCTT(T/C)CCGTGAAAATTTCTTACATA | 199 |
| OATP2, solute carrier family 21 member 6 | SLC21A6 | PS100s12 | 12 | 223 | 1 | AGGAATTAATATAGTCAAAG(A/G)AAAAATAATGAAATATATTT | 200 |
| OATP2, solute carrier family 21 member 6 | SLC21A6 | PS100s13 | 13 | 345 | 1 | ATTATGTTAATATTTCAATA(T/C)ATGCTTCAATTGAAAATTAT | 201 |
| OATP2, solute carrier family 21 member 6 | SLC21A6 | PS100s14 | 13 | 420 | 1 | CTATTAAGCATCAAAAATTT(C/T)GCCAAAGAAATACTTAATCA | 202 |
| OATP2, solute carrier family 21 member 6 | SLC21A6 | PS100s15 | 13 | 430 | 1 | CATTGATAAACTATTAAGCA(T/A)CAAAAATTTCGCCAAAGAAA | 203 |
| OATP2, solute carrier family 21 member 6 | SLC21A6 | PS100s16 | 13 | 434 | 1 | TCTACATTGATAAACTATTA(A/G)GCATCAAAAATTTCGCCAAA | 204 |
| OATP2, solute carrier family 21 member 6 | SLC21A6 | PS100s17 | 13 | 435 | 1 | TTCTACATTGATAAACTATT(A/T)AGCATCAAAAATTTCGCCAA | 205 |
| OATP2, solute carrier family 21 member 6 | SLC21A6 | PS100s18 | 13 | 475 | 1 | ATCCAAAACCAAAGAGAAGC(T/C)ATCAAATATTTCTAAATTT | 206 |
| OATP2, solute carrier family 21 member 6 | SLC21A6 | PS100s19 | 14 | 255 | 1 | GCCTGTGAGAGATAAATTTA(C/T)CCCAGTTGATAACCAGTGGT | 207 |
| OATP2, solute carrier family 21 member 6 | SLC21A6 | PS100s20 | 14 | 261 | 1 | CAAATTGCCTGTGAGAGATA(A/C)ATTTACCCCAGTTGTAACC | 208 |
| OATP2, solute carrier family 21 member 6 | SLC21A6 | PS100s21 | 14 | 396 | 1 | TTCAGTTACATCATTCTTTG(T/C)GCATTATAGAATATTTAGCA | 209 |
| OATP2, solute carrier family 21 member 6 | SLC21A6 | PS100s22 | 14 | 425 | 1 | GGTTTCTGAACATCCTCACT(A/G)TCAACATTTTCAGTTACATC | 210 |
| OATP2, solute carrier family 21 member 6 | SLC21A6 | PS100s23 | 16 | 244 | 0 | TGCCACTTGAAGATTTCCAA(C/G)CTGCTAGACAGGGTGAGATG | 211 |
| OATP2, solute carrier family 21 member 6 | SLC21A6 | PS100s24 | 16 | 384 | 0 | TTCTGGAAATATATGATAGA(C/G)ATATATCAAAAAGAGAGAGA | 212 |
| OATP2, solute carrier family 21 member 6 | SLC21A6 | PS100s25 | 17 | 133 | 0 | AGGTAAAAGGACAATGACAT(C/T)ACAGCAGTAAAACATGAGAA | 213 |
| OATP2, solute carrier family 21 member 6 | SLC21A6 | PS100s26 | 17 | 81 | 0 | ATTCCAACGGTGTTCAGTTT(G/C)AATTTTTTAATGATATATCC | 214 |
| OATP2, solute carrier family 21 member 6 | SLC21A6 | PS100s27 | 17 | 380 | 0 | ATTTTACTTTAAGTTCTGGG(A/G)TACATGTGCAGAATGTGCAT | 215 |
| OATP2, solute carrier family 21 member 6 | SLC21A6 | PS100s28 | 18 | 251 | 1 | TCATTAGGTGTGTTTATAGT(C/G)TCATGCATATGAAAATGTTT | 216 |
| OATP2, solute carrier family 21 member 6 | SLC21A6 | PS100s29 | 19 | 75 | 1 | GAAGCATATTACCCATGAAC(A/G)CATATATCCACATGTATGAC | 217 |
| OATP2, solute carrier family 21 member 6 | SLC21A6 | PS100s30 | 19 | 125 | 1 | ATCAATGTAAGAAAGCCCCA(A/G)TGGTACTATGGGAGTCTCCC | 218 |
| OATP2, solute carrier family 21 member 6 | SLC21A6 | PS100s31 | 19 | 151 | 1 | GAAGAATGTCCTTCTTTAGC(G/A)AAATCATCAATGTAAGAAAG | 219 |
| OATP2, solute carrier family 21 member 6 | SLC21A6 | PS100s32 | 18 | 513 | 1 | GCATGTGTGCTTAGAAAGAC(G/A)TTATCATGGTACCTTGTTCT | 220 |
| OATP2, solute carrier family 21 member 6 | SLC21A6 | PS100s33 | 20 | 156 | 0 | ACAGATATTATTGTAGCATA(T/C)TCCAAAGCTAGACTTCAGGC | 221 |
| OATP2, solute carrier family 21 member 6 | SLC21A6 | PS100s34 | 20 | 170 | 0 | AGCATATATCCAAGCTAGAC(T/G)TCAGGCCTTAGTATTATAGT | 222 |
| OATP2, solute carrier family 21 member 6 | SLC21A6 | PS100s35 | 20 | 180 | 0 | CAAGCTAGACTTCAGGCCTT(A/C)GTATTATAGTTCAAACTCTG | 223 |
| OATP2, solute carrier family 21 member 6 | SLC21A6 | PS100s36 | 20 | 291 | 0 | TTTAACCTCTAACCTGTATGA(T/C)ACTCATTTGTTTTATTAAGA | 224 |
| cMOAT, ATP-binding cassette sub-family C member 2 | ABCC2 | PS101s1 | 4 | 284 | 1 | TCTGGTTGGTGTCAATCCTC(A/T)CCTCATTGTGTTTCAGAAAT | 225 |
| cMOAT, ATP-binding cassette sub-family C member 2 | ABCC2 | PS101s2 | 6 | 213 | 1 | CCTACCTTCTCCATGCTACC(G/A)ATGTCACAAGTGATCCCTCT | 226 |
| cMOAT, ATP-binding cassette sub-family C member 2 | ABCC2 | PS101s3 | 7 | 53 | 0 | GGCATGTGCCCGAGTAAGTT(C/G)TAGAGCTCACCTGGGGGATG | 227 |
| cMOAT, ATP-binding cassette sub-family C member 2 | ABCC2 | PS101s4 | 7 | 100 | 0 | AGCTTCTCTCGGAGGTCGTG(G/A)GCASCCTCTAAGATTCTGAA | 228 |
| cMOAT, ATP-binding cassette sub-family C member 2 | ABCC2 | PS101s5 | 7 | 148 | 0 | TCAATGATAATCTGACCACC(G/A)GCASCCTCTAAGATTCTGAA | 229 |
| cMOAT, ATP-binding cassette sub-family C member 2 | ABCC2 | PS101s6 | 9 | 112 | 1 | GTCTGAATGAGGTTGTCTGT(C/T)CTAGATCCACCGCAGCAGT | 230 |
| cMOAT, ATP-binding cassette sub-family C member 2 | ABCC2 | PS101s7 | 9 | 190 | 1 | TTGTCACTGTCCATGATGGT(G/A)TGCAGCCTGTGGGCGATGGT | 231 |
| cMOAT, ATP-binding cassette sub-family C member 2 | ABCC2 | PS101s8 | 9 | 222 | 1 | ATCCGTGTCAAGCCCCTGTCC(C/T)CCTACACTCACTTGTCACTG | 232 |
| cMOAT, ATP-binding cassette sub-family C member 2 | ABCC2 | PS101s9 | 9 | 284 | 1 | TAACCTTCTGCCATCAGGT(G/A)TTTCCCGGCTGACACTGTTA | 233 |
| cMOAT, ATP-binding cassette sub-family C member 2 | ABCC2 | PS101s10 | 13 | 254 | 1 | CCTCATTGTGTTTCAGAAAT(C/A)GCTGCTGGTGCTCAAAGGCA | 234 |
| cMOAT, ATP-binding cassette sub-family C member 2 | ABCC2 | PS101s11 | 15 | 192 | 1 | TTTTCTGTGTGGTGTTCACC(T/C)TTCCAGTTTCTATGAATTCC | 235 |
| cMOAT, ATP-binding cassette sub-family C member 2 | ABCC2 | PS101s12 | 15 | 264 | 1 | CTCAAATGCTACTTTTCTGT(G/A)TGGTGTTCACCTTTCCAGTT | 236 |
| cMOAT, ATP-binding cassette sub-family C member 2 | ABCC2 | PS101s13 | 16 | 859 | 0 | TGTCCAGAGTCTTCTGTGAG(T/C)ACAAGGGCCAGCTCTATGGC | 237 |
| cMOAT, ATP-binding cassette sub-family C member 2 | ABCC2 | PS101s14 | 17 | 367 | 0 | TAAAAGGGACCAAGCAT(T/A)GTGCTAAGTTTCAGGAACAC | 238 |
| cMOAT, ATP-binding cassette sub-family C member 2 | ABCC2 | PS101s15 | 18 | 86 | 0 | TTATCAGGGAAHHHHCATGA(G/A)AACCTTTGCTTTCAGCTCAT | 239 |
| cMOAT, ATP-binding cassette sub-family C member 2 | ABCC2 | PS101s16 | 18 | 172 | 0 | ACATAGCTCATTTCCCCATG(C/A)ATTCTATTACATGGAATTTT | 240 |
| cMOAT, ATP-binding cassette sub-family C member 2 | ABCC2 | PS101s17 | 19 | 345 | 0 | GGGAAAGAGCTGCATAGATC(C/T)CTGTCAGTCCTATGAACAAG | 241 |
| cMOAT, ATP-binding cassette sub-family C member 2 | ABCC2 | PS101s18 | 19 | 367 | 0 | TGTCAGTCCTATGAACAAGG(A/G)GAGAGAASCCTCCTCTGATC | 242 |
| cMOAT, ATP-binding cassette sub-family C member 2 | ABCC2 | PS101s19 | 20 | 281 | 1 | TCCTGGACTGCGTCTGGAG(G/A)AAGACTCTTCTATTAATATG | 243 |
| cMOAT, ATP-binding cassette sub-family C member 2 | ABCC2 | PS101s20 | 21 | 243 | 1 | AGAAGACTGAAAATCATCA(A/G)GCACAGAAACCAACTCAAC | 244 |
| cMOAT, ATP-binding cassette sub-family C member 2 | ABCC2 | PS101s21 | 25 | 285 | 1 | ATGGTACAAAGGAGGAAAAG(C/T)GGCATGGGGCGGTGAGAGGG | 245 |
| cMOAT, ATP-binding cassette sub-family C member 2 | ABCC2 | PS101s22 | 29 | 136 | 0 | TCCAGAGCCGACAGGGCCT(A/G)TCACAGCCACAAGTTGGCCT | 246 |
| cMOAT, ATP-binding cassette sub-family C member 2 | ABCC2 | PS101s23 | 30 | 545 | 0 | CAGGTTCACTGTTTCTCCAA(C/T)GGTGTACTCCTTCCTGGCCA | 247 |
| cMOAT, ATP-binding cassette sub-family C member 2 | ABCC2 | PS101s24 | 30 | 575 | 0 | CTTCCTGGCCAAGTA(G/A)GGTCAATGCCTAAAGATAAG | 248 |
| cMOAT, ATP-binding cassette sub-family C member 2 | ABCC2 | PS101s25 | 31 | 132 | 1 | GAGCGAACCACAGGCTGAGA(C/A)CCCCAGGCTGGGTCAGAGGC | 249 |
| cMOAT, ATP-binding cassette sub-family C member 2 | ABCC2 | PS101s26 | 33 | 27 | 0 | TGGCCTGTGGGCTCCTGGGT(A/G)TGTCAACATATGACTAAATG | 250 |
| cMOAT, ATP-binding cassette sub-family C member 2 | ABCC2 | PS101s27 | 33 | 54 | 0 | CATATGACTAAATGGCAAAG(C/A)TGCTGAGGGGAGGAGTGAGT | 251 |
| cMOAT, ATP-binding cassette sub-family C member 2 | ABCC2 | PS101s28 | 33 | 63 | 0 | AAATGGCAAAGCTGCTGAGG(G/A)GAGGAGTGAGTGACTAGCAA | 252 |
| cMOAT, ATP-binding cassette sub-family C member 2 | ABCC2 | PS101s29 | 34 | 815 | 0 | AGAATACTGCCACTAACCGA(A/G)GACTGAGGGGAGAAGGATGT | 253 |
| cMOAT, ATP-binding cassette sub-family C member 2 | ABCC2 | PS101s30 | 35 | 650 | 1 | AGTTCAGGAATTAGATATTG(A/G)TTTACCACCACCCATGGC | 254 |
| cMOAT, ATP-binding cassette sub-family C member 2 | ABCC2 | PS101s31 | 35 | 742 | 1 | TCTAGTTTCCTCAAAGAGA(C/G)ACAGAACCCAGAAAGCAGAG | 255 |
| cMOAT, ATP-binding cassette sub-family C member 2 | ABCC2 | PS101s32 | 36 | 154 | 1 | GCAAGATGATGAAGAATAT(C/T)GAAAACAATCCTCTTGCTTG | 256 |
| cMOAT, ATP-binding cassette sub-family C member 2 | ABCC2 | PS101s33 | 36 | 680 | 1 | GGACATAATAATTCCTCCCT(A/G)TCAGAAAGATCCTCAGTATA | 257 |

| | REFSEQ | | | | | | | | | | | |
|---|---|---|---|---|---|---|---|---|---|---|---|---|
| | ALT (SEQ | | REF_SEQ_{—} | | | | MUTATION_{—} | REV_{—} | REF_{—} | ALT_{—} | CDNA_{—} | CDNA_{—} |
| GENE_DESCRIPTION | ID NO) | REF_SEQ_ID | POS | REF_NT | ALT_NT | EXON | TYPE | COMP | CODON | CODON | SEQ_ID | SEQ_POS |
| OATP2, solute carrier family 21 member 6 | 258 | AC022335 8 | 82621 | C | T | Exon5 | Silent | 1 | TCG | TCA | AF205071 1 | 545 |
| OATP2, solute carrier family 21 member 6 | 259 | AC022335 8 | 82589 | G | T | Exon5 | Missense | 1 | CCT | ACT | AF205071 1 | 597 |
| OATP2, solute carrier family 21 member 6 | 260 | AC022335 8 | 82391 | G | A | Intron5 | Non-CDS | 1 | | | AF205071 1 | |
| OATP2, solute carrier family 21 member 6 | 261 | AC022335 8 | 82386 | T | A | Intron5 | Non-CDS | 1 | | | AF205071 1 | |
| OATP2, solute carrier family 21 member 6 | 262 | AC022335 8 | 82362 | C | T | Intron5 | Non-CDS | 1 | | | AF205071 1 | |
| OATP2, solute carrier family 21 member 6 | 263 | AC022335 8 | 82360 | C | T | Intron5 | Non-CDS | 1 | | | AF205071 1 | |
| OATP2, solute carrier family 21 member 6 | 264 | AC022335 8 | 20092 | A | G | Exon5 | Non-CDS | 1 | | | AF205071 1 | 2377 |
| OATP2, solute carrier family 21 member 6 | 265 | AC022335 8 | 82550 | C | A | Intron5 | Non-CDS | 1 | | | AF205071 1 | |
| OATP2, solute carrier family 21 member 6 | 266 | AC022335 8 | 82644 | T | C | Exon5 | Missense | 1 | GAT | TAT | AF205071 1 | 522 |
| OATP2, solute carrier family 21 member 6 | 267 | AC022335 8 | 128151 | A | T | Intron1 | Non-CDS | 1 | | | AF205071 1 | |
| OATP2, solute carrier family 21 member 6 | 268 | AC022335 8 | 128152 | T | C | Intron1 | Non-CDS | 1 | | | AF205071 1 | |
| OATP2, solute carrier family 21 member 6 | 269 | AC022335 8 | 34576 | A | G | Intron14 | Non-CDS | 1 | | | AF205071 1 | |
| OATP2, solute carrier family 21 member 6 | 270 | AC022335 8 | 117572 | T | C | Intron2 | Non-CDS | 1 | | | AF205071 1 | |
| OATP2, solute carrier family 21 member 6 | 271 | AC022335 8 | 117597 | C | T | Intron2 | Non-CDS | 1 | | | AF205071 1 | |
| OATP2, solute carrier family 21 member 6 | 272 | AC022335 8 | 117587 | T | A | Intron2 | Non-CDS | 1 | | | AF205071 1 | |
| OATP2, solute carrier family 21 member 6 | 273 | AC022335 8 | 117583 | A | G | Intron2 | Non-CDS | 1 | | | AF205071 1 | |
| OATP2, solute carrier family 21 member 6 | 274 | AC022335 8 | 117582 | A | T | Intron2 | Non-CDS | 1 | | | AF205071 1 | |
| OATP2, solute carrier family 21 member 6 | 275 | AC022335 8 | 117542 | T | C | Intron2 | Non-CDS | 1 | | | AF205071 1 | |
| OATP2, solute carrier family 21 member 6 | 276 | AC022335 8 | 88574 | C | T | Intron3 | Non-CDS | 1 | | | AF205071 1 | |
| OATP2, solute carrier family 21 member 6 | 277 | AC022335 8 | 86568 | A | C | Intron3 | Non-CDS | 1 | | | AF205071 1 | |
| OATP2, solute carrier family 21 member 6 | 278 | AC022335 8 | 86433 | T | C | Intron3 | Non-CDS | 1 | | | AF205071 1 | |
| OATP2, solute carrier family 21 member 6 | 279 | AC022335 8 | 86404 | A | G | Intron3 | Non-CDS | 1 | | | AF205071 1 | |
| OATP2, solute carrier family 21 member 6 | 280 | AC022335 8 | 53449 | C | G | Exon11 | Missense | 1 | GGT | GCT | AF205071 1 | 1597 |
| OATP2, solute carrier family 21 member 6 | 281 | AC022335 8 | 53599 | C | G | Intron10 | Non-CDS | 1 | | | AF205071 1 | |
| OATP2, solute carrier family 21 member 6 | 282 | AC022335 8 | 56645 | C | T | Exon10 | Silent | 1 | GTG | GTA | AF205071 1 | 1382 |
| OATP2, solute carrier family 21 member 6 | 283 | AC022335 8 | 58893 | G | C | Exon10 | Missense | 1 | TTC | TTG | AF205071 1 | 1334 |
| OATP2, solute carrier family 21 member 6 | 284 | AC022335 8 | 57092 | A | G | Intron9 | Non-CDS | 1 | | | AF205071 1 | |
| OATP2, solute carrier family 21 member 6 | 285 | AC022335 8 | 42107 | C | G | Intron12 | Non-CDS | 1 | | | AF205071 1 | |
| OATP2, solute carrier family 21 member 6 | 286 | AC022335 8 | 60633 | A | G | Exon6 | Missense | 1 | GTG | GCG | AF205071 1 | 655 |
| OATP2, solute carrier family 21 member 6 | 287 | AC022335 8 | 60783 | A | G | Exon6 | Silent | 1 | TTG | CTG | AF205071 1 | 705 |
| OATP2, solute carrier family 21 member 6 | 288 | AC022335 8 | 60757 | G | A | Exon6 | Silent | 1 | TTC | TTT | AF205071 1 | 731 |
| OATP2, solute carrier family 21 member 6 | 289 | AC022335 8 | 80385 | G | A | Intron7 | Non-CDS | 1 | | | AF205071 1 | |
| OATP2, solute carrier family 21 member 6 | 290 | AC022335 8 | 19796 | T | C | Exon15 | Non-CDS | 1 | | | AF205071 1 | 2673 |
| OATP2, solute carrier family 21 member 6 | 291 | AC022335 8 | 19810 | T | G | Exon15 | Non-CDS | 1 | | | AF205071 1 | 2658 |
| OATP2, solute carrier family 21 member 6 | 292 | AC022335 8 | 19820 | A | C | Exon15 | Non-CDS | 1 | | | AF205071 1 | 2649 |
| OATP2, solute carrier family 21 member 6 | 293 | AC022335 8 | 19831 | T | C | Exon15 | Non-CDS | 1 | | | AF205071 1 | 2538 |
| cMOAT, ATP-binding cassette sub-family C member 2 | 294 | AL392107 4 | 56274 | A | T | Exon25 | Missense | 1 | GAG | GTG | U49248 1 | 3664 |
| cMOAT, ATP-binding cassette sub-family C member 2 | 295 | AL392107 4 | 58303 | G | A | Exon28 | Silent | 1 | ATC | ATT | U49248 1 | 4073 |
| cMOAT, ATP-binding cassette sub-family C member 2 | 296 | AL392107 4 | 56960 | C | G | Intron29 | Non-CDS | 1 | | | U49248 1 | |
| cMOAT, ATP-binding cassette sub-family C member 2 | 297 | AL392107 4 | 57007 | G | A | Exon29 | Silent | 1 | CTC | CTT | U49248 1 | 4211 |
| cMOAT, ATP-binding cassette sub-family C member 2 | 298 | AL392107 4 | 57055 | G | A | Exon29 | Silent | 1 | GCC | GCT | U49248 1 | 4163 |
| cMOAT, ATP-binding cassette sub-family C member 2 | 299 | AL392107 4 | 52055 | C | T | Exon31 | Silent | 1 | GAG | GAA | U49248 1 | 4511 |
| cMOAT, ATP-binding cassette sub-family C member 2 | 300 | AL392107 4 | 51977 | G | A | Exon31 | Silent | 1 | CAT | CAC | U49248 1 | 4589 |
| cMOAT, ATP-binding cassette sub-family C member 2 | 301 | AL392107 4 | 51945 | C | T | Intron31 | Non-CDS | 1 | | | U49248 1 | |
| cMOAT, ATP-binding cassette sub-family C member 2 | 302 | AL392107 4 | 51883 | G | A | Intron31 | Non-CDS | 1 | | | U49248 1 | |
| cMOAT, ATP-binding cassette sub-family C member 2 | 303 | AL392107 4 | 66295 | C | A | Exon25 | Missense | 1 | CGA | CTA | U49248 1 | 3643 |
| cMOAT, ATP-binding cassette sub-family C member 2 | 304 | AL392107 4 | 71683 | T | C | Exon21 | Missense | 1 | AAG | AGG | U49248 1 | 2963 |
| cMOAT, ATP-binding cassette sub-family C member 2 | 305 | AL392107 4 | 71651 | G | A | Intron21 | Non-CDS | 1 | | | U49248 1 | |
| cMOAT, ATP-binding cassette sub-family C member 2 | 306 | AL392107 4 | 110259 | 1 | C | Exon3 | Silent | 1 | GTA | GTG | U49248 1 | 359 |
| cMOAT, ATP-binding cassette sub-family C member 2 | 307 | AL392107 4 | 94484 | T | A | Intron12 | Non-CDS | 1 | | | U49248 1 | |
| cMOAT, ATP-binding cassette sub-family C member 2 | 308 | AL392107 4 | 90742 | G | A | Intron15 | Non-CDS | 1 | | | U49248 1 | |
| cMOAT, ATP-binding cassette sub-family C member 2 | 309 | AL392107 4 | 90828 | C | A | Intron15 | Non-CDS | 1 | | | U49248 1 | |
| cMOAT, ATP-binding cassette sub-family C member 2 | 310 | AL392107 4 | 72250 | C | T | Intron19 | Non-CDS | 1 | | | U49248 1 | |
| cMOAT, ATP-binding cassette sub-family C member 2 | 311 | AL392107 4 | 72272 | A | G | Intron19 | Non-CDS | 1 | | | U49248 1 | |
| cMOAT, ATP-binding cassette sub-family C member 2 | 312 | AL392107 4 | 119722 | G | A | Exon1 | Non-CDS | 1 | | | U49248 1 | 78 |
| cMOAT, ATP-binding cassette sub-family C member 2 | 313 | AL392107 4 | 58988 | A | G | Intron25 | Non-CDS | 1 | | | U49248 1 | |
| cMOAT, ATP-binding cassette sub-family C member 2 | 314 | AL392107 4 | 94844 | C | T | Intron12 | Non-CDS | 1 | | | U49248 1 | |
| cMOAT, ATP-binding cassette sub-family C member 2 | 315 | AL392107 4 | 89454 | A | G | Exon16 | Missense | 1 | ATA | ACA | U49248 1 | 2110 |
| cMOAT, ATP-binding cassette sub-family C member 2 | 316 | AL392107 4 | 98465 | C | T | Exon10 | Missense | 1 | GTT | ATT | U49248 1 | 1350 |
| cMOAT, ATP-binding cassette sub-family C member 2 | 317 | AL392107 4 | 98496 | G | A | Exon10 | Missense | 1 | CTA | TTA | U49248 1 | 1320 |
| cMOAT, ATP-binding cassette sub-family C member 2 | 318 | AL392107 4 | 105455 | C | A | Intron6 | Non-CDS | 1 | | | U49248 1 | |
| cMOAT, ATP-binding cassette sub-family C member 2 | 319 | AL392107 4 | 57834 | A | G | Intron24 | Non-CDS | 1 | | | U49248 1 | |
| cMOAT, ATP-binding cassette sub-family C member 2 | 320 | AL392107 4 | 57861 | C | A | Intron24 | Non-CDS | 1 | | | U49248 1 | |
| cMOAT, ATP-binding cassette sub-family C member 2 | 321 | AL392107 4 | 57870 | G | A | Intron24 | Non-CDS | 1 | | | U49248 1 | |
| cMOAT, ATP-binding cassette sub-family C member 2 | 322 | AL392107 4 | 109039 | A | G | Intron3 | Non-CDS | 1 | | | U49248 1 | |
| cMOAT, ATP-binding cassette sub-family C member 2 | 323 | AL392107 4 | 83188 | A | G | Intron19 | Non-CDS | 1 | | | U49248 1 | |
| cMOAT, ATP-binding cassette sub-family C member 2 | 324 | AL392107 4 | 83096 | C | G | Intron19 | Non-CDS | 1 | | | U49248 1 | |
| cMOAT, ATP-binding cassette sub-family C member 2 | 325 | AL392107 4 | 70852 | C | T | Exon22 | Silent | 1 | TCG | TCA | U49248 1 | 3025 |
| cMOAT, ATP-binding cassette sub-family C member 2 | 326 | AL392107 4 | 70326 | A | G | Intron23 | Non-CDS | 1 | | | U49248 1 | |

[1111] TABLE VI

| | | | | CONTIG_{—} | REF_{—} | ALT_{—} | | MUTATION_{—} |
|---|---|---|---|---|---|---|---|---|
| GENE_DESCRIPTION | HGNC_ID | SNP_ID | CONTIG_NUM | POS | AA | AA | EXON | TYPE |
| OATP2, solute carrier family 21 member 6 | SLC21A6 | PS100s1 | 4 | 208 | S | S | Exon5 | Silent |
| OATP2, solute carrier family 21 member 6 | SLC21A6 | PS100s2 | 4 | 260 | P | T | Exon5 | Missense |
| OATP2, solute carrier family 21 member 6 | SLC21A6 | PS100s9 | 9 | 308 | D | Y | Exon5 | Missense |
| OATP2, solute carrier family 21 member 6 | SLC21A6 | PS100s23 | 16 | 244 | G | A | Exon11 | Missense |
| OATP2, solute carrier family 21 member 6 | SLC21A6 | PS100s25 | 17 | 133 | V | V | Exon10 | Silent |
| OATP2, solute carrier family 21 member 6 | SLC21A6 | PS100s26 | 17 | 181 | F | K | Exon10 | Missense |
| OATP2, solute carrier family 21 member 6 | SLC21A6 | PS100s29 | 19 | 75 | V | A | Exon6 | Missense |
| OATP2, solute carrier family 21 member 6 | SLC21A6 | PS100s30 | 19 | 125 | L | L | Exon6 | Silent |
| OATP2, solute carrier family 21 member 6 | SLC21A6 | PS100s31 | 19 | 151 | F | F | Exon6 | Silent |
| cMOAT, ATP-binding cassette sub-family C | ABCC2 | PS101s1 | 4 | 284 | E | V | Exon25 | Missense |
| member 2 | | | | | | | | |
| cMOAT, ATP-binding cassette sub-family C | ABCC2 | PS101s2 | 6 | 213 | I | I | Exon28 | Silent |
| member 2 | | | | | | | | |
| cMOAT, ATP-binding cassette sub-family C | ABCC2 | PS101s4 | 7 | 100 | L | L | Exon29 | Silent |
| member 2 | | | | | | | | |
| cMOAT, ATP-binding cassette sub-family C | ABCC2 | PS101s5 | 7 | 148 | A | A | Exon29 | Silent |
| member 2 | | | | | | | | |
| cMOAT, ATP-binding cassette sub-family C | ABCC2 | PS101s6 | 9 | 112 | E | E | Exon31 | Silent |
| member 2 | | | | | | | | |
| cMOAT, ATP-binding cassette sub-family C | ABCC2 | PS101s7 | 9 | 190 | H | H | Exon31 | Silent |
| member 2 | | | | | | | | |
| cMOAT, ATP-binding cassette sub-family C | ABCC2 | PS101s10 | 13 | 264 | R | L | Exon25 | Missense |
| member 2 | | | | | | | | |
| cMOAT, ATP-binding cassette sub-family C | ABCC2 | PS101s11 | 15 | 192 | K | R | Exon21 | Missense |
| member 2 | | | | | | | | |
| cMOAT, ATP-binding cassette sub-family C | ABCC2 | PS101s13 | 16 | 859 | V | V | Exon3 | Slient |
| member 2 | | | | | | | | |
| cMOAT, ATP-binding cassette sub-family C | ABCC2 | PS101s22 | 29 | 136 | I | T | Exon16 | Missense |
| member 2 | | | | | | | | |
| cMOAT, ATP-binding cassette sub-family C | ABCC2 | PS101s23 | 30 | 545 | V | I | Exon10 | Missense |
| member 2 | | | | | | | | |
| cMOAT, ATP-binding cassette sub-family C | ABCC2 | PS101s24 | 30 | 575 | L | K | Exon10 | Missense |
| member 2 | | | | | | | | |
| cMOAT, ATP-binding cassette sub-family C | ABCC2 | PS101s32 | 36 | 164 | S | S | Exon22 | Silent |
| member 2 | | | | | | | | |

| | | | | | | | REFSEQ | REFSEQ |
|---|---|---|---|---|---|---|---|---|
| | | | | | | | REF | ALT |
| | REV_{—} | REF_{—} | ALT_{—} | | PROTEIN_{—} | PROTEIN | (SEQ ID | (SEQ ID |
| GENE_DESCRIPTION | COMP | CODON | CODON | PROTEIN_ID | POS | (SEQ ID NO:) | NO:) | NO:) |
| OATP2, solute carrier family 21 member 6 | 1 | TCG | TCA | AAF20212_1 | 137 | 6 | 189 | 258 |
| OATP2, solute carrier family 21 member 6 | 1 | CCT | ACT | AAF20212_1 | 155 | 8 | 190 | 259 |
| OATP2, solute carrier family 21 member 6 | 1 | GAT | TAT | AAF20212_1 | 130 | 10 | 197 | 266 |
| OATP2, solute carrier family 21 member 6 | 1 | GGT | GCT | AAF20212_1 | 488 | 12 | 270 | 270 |
| OATP2, solute carrier family 21 member 6 | 1 | GTG | GTA | AAF20212_1 | 416 | 14 | 213 | 282 |
| OATP2, solute carrier family 21 member 6 | 1 | TTC | TTG | AAF20212_1 | 400 | 16 | 214 | 283 |
| OATP2, solute carrier family 21 member 6 | 1 | GTG | GCG | AAF20212_1 | 174 | 18 | 217 | 286 |
| OATP2, solute carrier family 21 member 6 | 1 | TTG | CTG | AAF20212_1 | 191 | 20 | 218 | 287 |
| OATP2, solute carrier family 21 member 6 | 1 | TTC | TTT | AAF20212_1 | 199 | 22 | 219 | 288 |
| cMOAT, ATP-binding cassette sub-family C | 1 | GAG | GTG | AAB09422_1 | 1,188 | 24 | 225 | 294 |
| member 2 | | | | | | | | |
| cMOAT, ATP-binding cassette sub-family C | 1 | ATC | ATT | AAB09422_1 | 1,324 | 26 | 226 | 295 |
| member 2 | | | | | | | | |
| cMOAT, ATP-binding cassette sub-family C | 1 | CTC | CTT | AAB09422_1 | 1,370 | 28 | 228 | 297 |
| member 2 | | | | | | | | |
| cMOAT, ATP-binding cassette sub-family C | 1 | GCC | GCT | AAB09422_1 | 1,354 | 30 | 229 | 298 |
| member 2 | | | | | | | | |
| cMOAT, ATP-binding cassette sub-family C | 1 | GAG | GAA | AAB09422_1 | 1,470 | 32 | 230 | 299 |
| member 2 | | | | | | | | |
| cMOAT, ATP-binding cassette sub-family C | 1 | CAT | CAC | AAB09422_1 | 1,496 | 34 | 231 | 300 |
| member 2 | | | | | | | | |
| cMOAT, ATP-binding cassette sub-family C | 1 | CGA | CTA | AAB09422_1 | 1,181 | 36 | 234 | 303 |
| member 2 | | | | | | | | |
| cMOAT, ATP-binding cassette sub-family C | 1 | AAG | AGG | AAB09422_1 | 961 | 38 | 235 | 304 |
| member 2 | | | | | | | | |
| cMOAT, ATP-binding cassette sub-family C | 1 | GTA | GTG | AAB09422_1 | 86 | 40 | 237 | 306 |
| member 2 | | | | | | | | |
| cMOAT, ATP-binding cassette sub-family C | 1 | ATA | ACA | AAB09422_1 | 670 | 42 | 246 | 315 |
| member 2 | | | | | | | | |
| cMOAT, ATP-binding cassette sub-family C | 1 | GTT | ATT | AAB09422_1 | 417 | 44 | 247 | 316 |
| member 2 | | | | | | | | |
| cMOAT, ATP-binding cassette sub-family C | 1 | CTA | TTA | AAB06422_1 | 407 | 46 | 248 | 317 |
| member 2 | | | | | | | | |
| cMOAT, ATP-binding cassette sub-family C | 1 | TCG | TCA | AAB09422_1 | 978 | 48 | 256 | 325 |
| member 2 | | | | | | | | |

[1112] TABLE VII

| Ethnicity | Coriell DNA Sample ID | Plate No. |
|---|---|---|
| African American | NA14905 | 1 |
| African American | NA14922 | 2 |
| African American | NA14923 | 3 |
| African American | NA14924 | 4 |
| African American | NA14925 | 5 |
| African American | NA14932 | 6 |
| African American | NA14933 | 7 |
| African American | NA14934 | 8 |
| Caucasian | NA 17201 | 9 |
| Caucasian | NA17202 | 10 |
| Caucasian | NA17203 | 11 |
| Caucasian | NA17204 | 12 |
| Caucasian | NA17205 | 13 |
| Caucasian | NA17206 | 14 |
| Caucasian | NA17207 | 15 |
| Caucasian | NA17208 | 16 |
| Chinese | NA00576 | 17 |
| Chinese | NA03433 | 18 |
| Chinese | NA06090 | 19 |
| Chinese | NA07426 | 20 |
| Japaness | NA02345b | 21 |
| Japaness | NA11589 | 22 |
| Japaness | NA14819 | 23 |
| Japaness | NA04535 | 24 |

[1113] TABLE VIII

| | | | | | PCR |
|---|---|---|---|---|---|
| | | | | | Amplicon_{—} |
| GENE_DESCRIPTION | HGNC_ID | SNP_ID | EXON | REV_COMP | Name |
| OATP2, solute carrier family 21 member 6 | SLC21A6 | PS100s1 | Exon5 | 1 | PS100p49p50 |
| OATP2, solute carrier family 21 member 6 | SLC21A6 | PS100s2 | Exon5 | 1 | PS100p49p50 |
| OATP2, solute carrier family 21 member 6 | SLC21A6 | PS100s3 | Intron5 | 1 | PS100p49p50 |
| OATP2, solute carrier family 21 member 6 | SLC21A6 | PS100s4 | Intron5 | 1 | PS100p49p50 |
| OATP2, solute carrier family 21 member 6 | SLC21A6 | PS100s5 | Intron5 | 1 | PS100p49p50 |
| OATP2, solute carrier family 21 member 6 | SLC21A6 | PS100s6 | Intron5 | 1 | PS100p49p50 |
| OATP2, solute carrier family 21 member 6 | SLC21A6 | PS100s7 | Exon15 | 1 | PS100p5p6 |
| OATP2, solute carrier family 21 member 6 | SLC21A6 | PS100s8 | Intron15 | 1 | PS100p49p50 |
| OATP2, solute carrier family 21 member 6 | SLC21A6 | PS100s9 | Exon5 | 1 | PS100p49p50 |
| OATP2, solute carrier family 21 member 6 | SLC21A6 | PS100s10 | Intron1 | 1 | PS100p65p66 |
| OATP2, solute carrier family 21 member 6 | SLC21A6 | PS100s11 | Intron1 | 1 | PS100p65p66 |
| OATP2, solute carrier family 21 member 6 | SLC21A6 | PS100s12 | Intron14 | 1 | PS100p13p14 |
| OATP2, solute carrier family 21 member 6 | SLC21A6 | PS100s13 | Intron2 | 1 | PS100p61p62 |
| OATP2, solute carrier family 21 member 6 | SLC21A6 | PS100s14 | Intron2 | 1 | PS100p61p62 |
| OATP2, solute carrier family 21 member 6 | SLC21A6 | PS100s15 | Intron2 | 1 | PS100p61p62 |
| OATP2, solute carrier family 21 member 6 | SLC21A6 | PS100s16 | Intron2 | 1 | PS100p61p62 |
| OATP2, solute carrier family 21 member 6 | SLC21A6 | PS100s17 | Intron2 | 1 | PS100p61p62 |
| OATP2, solute carrier family 21 member 6 | SLC21A6 | PS100s18 | Intron2 | 1 | PS100p61p62 |
| OATP2, solute carrier family 21 member 6 | SLC21A6 | PS100s19 | Intron3 | 1 | PS100p57p58 |
| OATP2, solute carrier family 21 member 6 | SLC21A6 | PS100s20 | Intron3 | 1 | PS100p57p58 |
| OATP2, solute carrier family 21 member 6 | SLC21A6 | PS100s21 | Intron3 | 1 | PS100p57p58 |
| OATP2, solute carrier family 21 member 6 | SLC21A6 | PS100s22 | Intron3 | 1 | PS100p57p58 |
| OATP2, solute carrier family 21 member 6 | SLC21A6 | PS100s23 | Exon11 | 1 | PS100p25p26 |
| OATP2, solute carrier family 21 member 6 | SLC21A6 | PS100s24 | Intron10 | 1 | PS100p25p26 |
| OATP2, solute carrier family 21 member 6 | SLC21A6 | PS100s25 | Exon10 | 1 | PS100p31p32 |
| OATP2, solute carrier family 21 member 6 | SLC21A6 | PS100s26 | Exon10 | 1 | PS100p31p32 |
| OATP2, solute carrier family 21 member 6 | SLC21A6 | PS100s27 | Intron9 | 1 | PS100p31p32 |
| OATP2, solute carrier family 21 member 6 | SLC21A6 | PS100s28 | Intron12 | 1 | PS100p21p22 |
| OATP2, solute carrier family 21 member 6 | SLC21A6 | PS100s29 | Exon6 | 1 | PS100p45p46 |
| OATP2, solute carrier family 21 member 6 | SLC21A6 | PS100s30 | Exon6 | 1 | PS100p45p46 |
| OATP2, solute carrier family 21 member 6 | SLC21A6 | PS100s31 | Exon6 | 1 | PS100p45p46 |
| OATP2, solute carrier family 21 member 6 | SLC21A6 | PS100s32 | Intron7 | 1 | PS100p41p42 |
| OATP2, solute carrier family 21 member 6 | SLC21A6 | PS100s34 | Exon15 | 1 | PS100p1p2 |
| OATP2, solute carrier family 21 member 6 | SLC21A6 | PS100s35 | Exon15 | 1 | PS100p1p2 |
| OATP2, solute carrier family 21 member 6 | SLC21A6 | PS100s36 | Exon15 | 1 | PS100p5p6 |
| cMOAT, ATP-binding cassette sub-family C member 2 | ABCC2 | PS101s1 | Exon25 | 1 | PS101p33p34 |
| cMOAT, ATP-binding cassette sub-family C member 2 | ABCC2 | PS101s2 | Exon28 | 1 | PS101p21p22 |
| cMOAT, ATP-binding cassette sub-family C member 2 | ABCC2 | PS101s3 | Intron29 | 1 | PS101p17p18 |
| cMOAT, ATP-binding cassette sub-family C member 2 | ABCC2 | PS101s4 | Exon29 | 1 | PS101p17p18 |
| cMOAT, ATP-binding cassette sub-family C member 2 | ABCC2 | PS101s5 | Exon29 | 1 | PS101p17p18 |
| cMOAT, ATP-binding cassette sub-family C member 2 | ABCC2 | PS101s6 | Exon31 | 1 | PS101p9p10 |
| cMOAT, ATP-binding cassette sub-family C member 2 | ABCC2 | PS101s7 | Exon31 | 1 | PS101p9p10 |
| cMOAT, ATP-binding cassette sub-family C member 2 | ABCC2 | PS101s8 | Intron31 | 1 | PS101p9p10 |
| cMOAT, ATP-binding cassette sub-family C member 2 | ABCC2 | PS101s9 | Intron31 | 1 | PS101p9p10 |
| cMOAT, ATP-binding cassette sub-family C member 2 | ABCC2 | PS101s10 | Exon25 | 1 | PS101p33p34 |
| cMOAT, ATP-binding cassette sub-family C member 2 | ABCC2 | PS101s11 | Exon21 | 1 | PS101p49p50 |
| cMOAT, ATP-binding cassette sub-family C member 2 | ABCC2 | PS101s12 | Intron21 | 1 | PS101p49p50 |
| cMOAT, ATP-binding cassette sub-family C member 2 | ABCC2 | PS101s13 | Exon3 | 1 | PS101p121p122 |
| cMOAT, ATP-binding cassette sub-family C member 2 | ABCC2 | PS101s14 | Intron12 | 1 | PS101p81p82 |
| cMOAT, ATP-binding cassette sub-family C member 2 | ABCC2 | PS101s15 | Intron15 | 1 | PS101p73p74 |
| cMOAT, ATP-binding cassette sub-family C member 2 | ABCC2 | PS101s16 | Intron15 | 1 | PS101p73p74 |
| cMOAT, ATP-binding cassette sub-family C member 2 | ABCC2 | PS101s17 | Intron19 | 1 | PS101p53p54 |
| cMOAT, ATP-binding cassette sub-family C member 2 | ABCC2 | PS101s18 | Intron19 | 1 | PS101p53p54 |
| cMOAT, ATP-binding cassette sub-family C member 2 | ABCC2 | PS101s19 | Exon1 | 1 | PS101p129p130 |
| cMOAT, ATP-binding cassette sub-family C member 2 | ABCC2 | PS101s20 | Intron26 | 1 | PS101p25p26 |
| cMOAT, ATP-binding cassette sub-family C member 2 | ABCC2 | PS101s21 | Intron12 | 1 | PS101p85p86 |
| cMOAT, ATP-binding cassette sub-family C member 2 | ABCC2 | PS101s22 | Exon16 | 1 | PS101p69p70 |
| cMOAT, ATP-binding cassette sub-family C member 2 | ABCC2 | PS101s23 | Exon10 | 1 | PS101p93p94 |
| cMOAT, ATP-binding cassette sub-family C member 2 | ABCC2 | PS101s24 | Exon10 | 1 | PS101p93p94 |
| cMOAT, ATP-binding cassette sub-family C member 2 | ABCC2 | PS101s25 | Intron6 | 1 | PS101p105p106 |
| cMOAT, ATP-binding cassette sub-family C member 2 | ABCC2 | PS101s26 | Intron24 | 1 | PS101p37p38 |
| cMOAT, ATP-binding cassette sub-family C member 2 | ABCC2 | PS101s27 | Intron24 | 1 | PS101p37p38 |
| cMOAT, ATP-binding cassette sub-family C member 2 | ABCC2 | PS101s28 | Intron24 | 1 | PS101p37p38 |
| cMOAT, ATP-binding cassette sub-family C member 2 | ABCC2 | PS101s29 | Intron3 | 1 | PS101p117p118 |
| cMOAT, ATP-binding cassette sub-family C member 2 | ABCC2 | PS101s30 | Intron19 | 1 | PS101p57p58 |
| cMOAT, ATP-binding cassette sub-family C member 2 | ABCC2 | PS101s31 | Intron19 | 1 | PS101p57p58 |
| cMOAT, ATP-binding cassette sub-family C member 2 | ABCC2 | PS101s32 | Exon22 | 1 | PS101p45p46 |
| cMOAT, ATP-binding cassette sub-family C member 2 | ABCC2 | PS101s33 | Intron23 | 1 | PS101p41p42 |

| GENE_DESCRIPTION | Target_Name | PCR Left primer |
|---|---|---|
| OATP2, solute carrier family 21 member 6 | SLC21A6_X5a | TTCAGATGGACAAAATTTGCA |
| OATP2, solute carrier family 21 member 6 | SLC21A6_X5a | TTCAGATGGACAAAATTTGCA |
| OATP2, solute carrier family 21 member 6 | SLC21A6_X5a | TTCAGATGGACAAAATTTGCA |
| OATP2, solute carrier family 21 member 6 | SLC21A6_X5a | TTCAGATGGACAAAATTTGCA |
| OATP2, solute carrier family 21 member 6 | SLC21A6_X5a | TTCAGATGGACAAAATTTGCA |
| OATP2, solute carrier family 21 member 6 | SLC21A6_X5a | TTCAGATGGACAAAATTTGCA |
| OATP2, solute carrier family 21 member 6 | SLC21A6_X15_f2a | CCAAGCTAGACTTCAGGCCTT |
| OATP2, solute carrier family 21 member 6 | SLC21A6_X5a | TTCAGATGGACAAAATTTGCA |
| OATP2, solute carrier family 21 member 6 | SLC21A6_X5a | TTCAGATGGACAAAATTTGCA |
| OATP2, solute carrier family 21 member 6 | SLC21A6_X1a | GGCTCTTCTACTCCCAGAAGG |
| OATP2, solute carrier family 21 member 6 | SLC21A6_X1a | GGCTCTTCTACTCCCAGAAGG |
| OATP2, solute carrier family 21 member 6 | SLC21A6_X14a | AAAATGAGATACGAGATTGCTTGA |
| OATP2, solute carrier family 21 member 6 | SLC21A6_X2a | CGTGATCAATCCAAAACCAAA |
| OATP2, solute carrier family 21 member 6 | SLC21A6_X2a | CGTGATCAATCCAAAACCAAA |
| OATP2, solute carrier family 21 member 6 | SLC21A6_X2a | CGTGATCAATCCAAAACCAAA |
| OATP2, solute carrier family 21 member 6 | SLC21A6_X2a | CGTGATCAATCCAAAACCAAA |
| OATP2, solute carrier family 21 member 6 | SLC21A6_X2a | CGTGATCAATCCAAAACCAAA |
| OATP2, solute carrier family 21 member 6 | SLC21A6_X2a | CGTGATCAATCCAAAACCAAA |
| OATP2, solute carrier family 21 member 6 | SLC21A6_X3a | CAGGGTTTCTGAACATCCTCA |
| OATP2, solute carrier family 21 member 6 | SLC21A6_X3a | CAGGGTTTCTGAACATCCTCA |
| OATP2, solute carrier family 21 member 6 | SLC21A6_X3a | CAGGGTTTCTGAACATCCTCA |
| OATP2, solute carrier family 21 member 6 | SLC21A6_X3a | CAGGGTTTCTGAACATCCTCA |
| OATP2, solute carrier family 21 member 6 | SLC21A6_X11a | AGAAAAACCTGATTGTGCCCT |
| OATP2, solute carrier family 21 member 6 | SLC21A6_X11a | AGAAAAACCTGATTGTGCCCT |
| OATP2, solute carrier family 21 member 6 | SLC21A6_X10 | TTTGATGGTTAACATATTATGCAATT |
| OATP2, solute carrier family 21 member 6 | SLC21A6_X10 | TTTGATGGTTAACATATTATGCAATT |
| OATP2, solute carrier family 21 member 6 | SLC21A6_X10 | TTTGATGGTTAACATATTATGCAATT |
| OATP2, solute carrier family 21 member 6 | SLC21A6_X12a | CAGCCTTGAGAGTTCATAGTAATTTT |
| OATP2, solute carrier family 21 member 6 | SLC21A6_X6a | TTTTAGAAAACAGAGATCCCAGG |
| OATP2, solute carrier family 21 member 6 | SLC21A6_X6a | TTTTAGAAAACAGAGATCCCAGG |
| OATP2, solute carrier family 21 member 6 | SLC21A6_X6a | TTTTAGAAAACAGAGATCCCAGG |
| OATP2, solute carrier family 21 member 6 | SLC21A6_X7a | GCAAAGGACTATTGAAAGAGTGAA |
| OATP2, solute carrier family 21 member 6 | SLC21A6_X15_f1a | TTTTTCCTAATACATTACCGTGG |
| OATP2, solute carrier family 21 member 6 | SLC21A6_X15_f1a | TTTTTCCTAATACATTACCGTGG |
| OATP2, solute carrier family 21 member 6 | SLC21A6_X15_f2a | CCAAGCTAGACTTCAGGCCTT |
| cMOAT, ATP-binding cassette sub-family C member 2 | ABCC2_X25a | TAGCATGACAGTGTGTGTGGC |
| cMOAT, ATP-binding cassette sub-family C member 2 | ABCC2_X28a | AGGGAGGAGCTGAGCAGAAG |
| cMOAT, ATP-binding cassette sub-family C member 2 | ABCC2_X29a | ACGTGTCCATCCTAGGGAACT |
| cMOAT, ATP-binding cassette sub-family C member 2 | ABCC2_X29a | ACGTGTCCATCCTAGGGAACT |
| cMOAT, ATP-binding cassette sub-family C member 2 | ABCC2_X29a | ACGTGTCCATCCTAGGGAACT |
| cMOAT, ATP-binding cassette sub-family C member 2 | ABCC2_X31a | TCATCAGTAATGTGGTGGTGG |
| cMOAT, ATP-binding cassette sub-family C member 2 | ABCC2_X31a | TCATCAGTAATGTGGTGGTGG |
| cMOAT, ATP-binding cassette sub-family C member 2 | ABCC2_X31a | TCATCAGTAATGTGGTGGTGG |
| cMOAT, ATP-binding cassette sub-family C member 2 | ABCC2_X31a | TCATCAGTAATGTGGTGGTGG |
| cMOAT, ATP-binding cassette sub-family C member 2 | ABCC2_X25a | TAGCATGACAGTGTGTGTGGC |
| cMOAT, ATP-binding cassette sub-family C member 2 | ABCC2_X21a | TTTCCTGTTCCTCCACACATC |
| cMOAT, ATP-binding cassette sub-family C member 2 | ABCC2_X21a | TTTCCTGTTCCTCCACACATC |
| cMOAT, ATP-binding cassette sub-family C member 2 | ABCC2_X3a | TGCTCAAATGAAGATGAAAAGC |
| cMOAT, ATP-binding cassette sub-family C member 2 | ABCC2_X13a | ACTGGGGCTCAGAAAACTCAT |
| cMOAT, ATP-binding cassette sub-family C member 2 | ABCC2_X15a | TGGGATCACAGCTGGATATTC |
| cMOAT, ATP-binding cassette sub-family C member 2 | ABCC2_X15a | TGGGATCACAGCTGGATATTC |
| cMOAT, ATP-binding cassette sub-family C member 2 | ABCC2_X20a | AGATGACCAGGGGAAACTGAC |
| cMOAT, ATP-binding cassette sub-family C member 2 | ABCC2_X20a | AGATGACCAGGGGAAACTGAC |
| cMOAT, ATP-binding cassette sub-family C member 2 | ABCC2_X1a | CCTGAGCTTTAGACCAATTGC |
| cMOAT, ATP-binding cassette sub-family C member 2 | ABCC2_X27a | GGGCCCATGTAAAATATGGAG |
| cMOAT, ATP-binding cassette sub-family C member 2 | ABCC2_X12a | GGGGTATGGTACAAAGGAGGA |
| cMOAT, ATP-binding cassette sub-family C member 2 | ABCC2_X16a | GGATGTCTCCAAGACCTCACC |
| cMOAT, ATP-binding cassette sub-family C member 2 | ABCC2_X10a | AAAGTCTTCCACCAGCTTTGC |
| cMOAT, ATP-binding cassette sub-family C member 2 | ABCC2_X10a | AAAGTCTTCCACCAGCTTTGC |
| cMOAT, ATP-binding cassette sub-family C member 2 | ABCC2_X7a | GTAAGGACAGAATCGCCATGA |
| cMOAT, ATP-binding cassette sub-family C member 2 | ABCC2_X24a | ACTTCAGCTTCAGACAGTGGC |
| cMOAT, ATP-binding cassette sub-family C member 2 | ABCC2_X24a | ACTTCAGCTTCAGACAGTGGC |
| cMOAT, ATP-binding cassette sub-family C member 2 | ABCC2_X24a | ACTTCAGCTTCAGACAGTGGC |
| cMOAT, ATP-binding cassette sub-family C member 2 | ABCC2_X4a | GAACAGGCAGGAGTAGGCTAGA |
| cMOAT, ATP-binding cassette sub-family C member 2 | ABCC2_X19a | GCCCAGGCATAGAGTTTCAAT |
| cMOAT, ATP-binding cassette sub-family C member 2 | ABCC2_X19a | GCCCAGGCATAGAGTTTCAAT |
| cMOAT, ATP-binding cassette sub-family C member 2 | ABCC2_X22a | GATGGAAGCAGTTTTGTCAGC |
| cMOAT, ATP-binding cassette sub-family C member 2 | ABCC2_X23a | GGAGCTCACAGCAGGTACTCA |

| | PCR Left | | PCR Right |
|---|---|---|---|
| | primer | | primer |
| | (SEQ | | (SEQ |
| GENE_DESCRIPTION | ID NO:) | PCR Right primer | ID NO:) |
| OATP2, solute carrier family 21 member 6 | 327 | AAAACACATGCTGGGAAATTG | 396 |
| OATP2, solute carrier family 21 member 6 | 328 | AAAACACATGCTGGGAAATTG | 397 |
| OATP2, solute carrier family 21 member 6 | 329 | AAAACACATGCTGGGAAATTG | 398 |
| OATP2, solute carrier family 21 member 6 | 330 | AAAACACATGCTGGGAAATTG | 399 |
| OATP2, solute carrier family 21 member 6 | 331 | AAAACACATGCTGGGAAATTG | 400 |
| OATP2, solute carrier family 21 member 6 | 332 | AAAACACATGCTGGGAAATTG | 401 |
| OATP2, solute carrier family 21 member 6 | 333 | CTGGGGCAGATAGTGAAACAC | 402 |
| OATP2, solute carrier family 21 member 6 | 334 | AAAACACATGCTGGGAAATTG | 403 |
| OATP2, solute carrier family 21 member 6 | 335 | AAAACACATGCTGGGAAATTG | 404 |
| OATP2, solute carrier family 21 member 6 | 336 | TGTGAGAATTCTGAGAAATATAATCTTTAA | 405 |
| OATP2, solute carrier family 21 member 6 | 337 | TGTGAGAATTCTGAGAAATATAATCTTTAA | 406 |
| OATP2, solute carrier family 21 member 6 | 338 | TTGGGTAGATGCAGAACAAAA | 407 |
| OATP2, solute carrier family 21 member 6 | 339 | TGATGATCTTGTGGCTTTTCTT | 408 |
| OATP2, solute carrier family 21 member 6 | 340 | TGATGATCTTGTGGCTTTTCTT | 409 |
| OATP2, solute carrier family 21 member 6 | 341 | TGATGATCTTGTGGCTTTTCTT | 410 |
| OATP2, solute carrier family 21 member 6 | 342 | TGATGATCTTGTGGCTTTTCTT | 411 |
| OATP2, solute carrier family 21 member 6 | 343 | TGATGATCTTGTGGCTTTTCTT | 412 |
| OATP2, solute carrier family 21 member 6 | 344 | TGATGATCTTGTGGCTTTTCTT | 413 |
| OATP2, solute carrier family 21 member 6 | 345 | CCCCCTTTCCTTCTGATTTTT | 414 |
| OATP2, solute carrier family 21 member 6 | 346 | CCCCCTTTCCTTCTGATTTTT | 415 |
| OATP2, solute carrier family 21 member 6 | 347 | CCCCCTTTCCTTCTGATTTTT | 416 |
| OATP2, solute carrier family 21 member 6 | 348 | CCCCCTTTCCTTCTGATTTTT | 417 |
| OATP2, solute carrier family 21 member 6 | 349 | TTCCCTCTTTCTCTGCTTTCA | 418 |
| OATP2, solute carrier family 21 member 6 | 350 | TTCCCTCTTTCTCTGCTTTCA | 419 |
| OATP2, solute carrier family 21 member 6 | 351 | CATGCACATTCTGCACATGTA | 420 |
| OATP2, solute carrier family 21 member 6 | 352 | CATGCACATTCTGCACATGTA | 421 |
| OATP2, solute carrier family 21 member 6 | 353 | CATGCACATTCTGCACATGTA | 422 |
| OATP2, solute carrier family 21 member 6 | 354 | TTTGAACAAGTGAGACTTCACTAAA | 423 |
| OATP2, solute carrier family 21 member 6 | 355 | TGTTTAAAATGAAACACTCTCTTATCTACA | 424 |
| OATP2, solute carrier family 21 member 6 | 356 | TGTTTAAAATGAAACACTCTCTTATCTACA | 425 |
| OATP2, solute carrier family 21 member 6 | 357 | TGTTTAAAATGAAACACTCTCTTATCTACA | 426 |
| OATP2, solute carrier family 21 member 6 | 358 | CATATTTCTTTTAAAAACATGGTGAA | 427 |
| OATP2, solute carrier family 21 member 6 | 359 | AAAGTGAGAGACATGGTTACTGTG | 428 |
| OATP2, solute carrier family 21 member 6 | 360 | AAAGTGAGAGACATGGTTACTGTG | 429 |
| OATP2, solute carrier family 21 member 6 | 361 | AAAGTGAGAGACATGGTTACTGTG | 430 |
| OATP2, solute carrier family 21 member 6 | 362 | CTGGGGCAGATAGTGAAACAC | 431 |
| cMOAT, ATP-binding cassette sub-family C member 2 | 363 | GCAGGCTTTTGTCTTGTTCAG | 432 |
| cMOAT, ATP-binding cassette sub-family C member 2 | 364 | TTCTATGACACGAGTCCTGGG | 433 |
| cMOAT, ATP-binding cassette sub-family C member 2 | 365 | TCCTCACCAAAACCAAAATCA | 434 |
| cMOAT, ATP-binding cassette sub-family C member 2 | 366 | TCCTCACCAAAACCAAAATCA | 435 |
| cMOAT, ATP-binding cassette sub-family C member 2 | 367 | TCCTCACCAAAACCAAAATCA | 436 |
| cMOAT, ATP-binding cassette sub-family C member 2 | 368 | GGGGGTTTTGAAAGTCTGATC | 437 |
| cMOAT, ATP-binding cassette sub-family C member 2 | 369 | GGGGGTTTTGAAAGTCTGATC | 438 |
| cMOAT, ATP-binding cassette sub-family C member 2 | 370 | GGGGGTTTTGAAAGTCTGATC | 439 |
| cMOAT, ATP-binding cassette sub-family C member 2 | 371 | GGGGGTTTTGAAAGTCTGATC | 440 |
| cMOAT, ATP-binding cassette sub-family C member 2 | 372 | GCAGGCTTTTGTCTTGTTCAG | 441 |
| cMOAT, ATP-binding cassette sub-family C member 2 | 373 | CAAGAAGACCCTTGGGAATTG | 442 |
| cMOAT, ATP-binding cassette sub-family C member 2 | 374 | CAAGAAGACCCTTGGGAATTG | 443 |
| cMOAT, ATP-binding cassette sub-family C member 2 | 375 | TGTATGTATCCATTCTTTCCAGAA | 444 |
| cMOAT, ATP-binding cassette sub-family C member 2 | 376 | AGGCGCCTTCAACTCTGATAT | 445 |
| cMOAT, ATP-binding cassette sub-family C member 2 | 377 | ACCTCCTGTTAGCGTAGGAGC | 446 |
| cMOAT, ATP-binding cassette sub-family C member 2 | 378 | ACCTCCTGTTAGCGTAGGAGC | 447 |
| cMOAT, ATP-binding cassette sub-family C member 2 | 379 | CATGCTGTATGTACATCTGGGA | 448 |
| cMOAT, ATP-binding cassette sub-family C member 2 | 380 | CATGCTGTATGTACATCTGGGA | 449 |
| cMOAT, ATP-binding cassette sub-family C member 2 | 381 | GCCAGCTCTGTTGACATCTTT | 450 |
| cMOAT, ATP-binding cassette sub-family C member 2 | 382 | TGCCAGACTCTCAAATTCCAG | 451 |
| cMOAT, ATP-binding cassette sub-family C member 2 | 383 | AGATACACCTGGTGCCCTTTC | 452 |
| cMOAT, ATP-binding cassette sub-family C member 2 | 384 | AGGGGAAATCTCCTGATACCA | 453 |
| cMOAT, ATP-binding cassette sub-family C member 2 | 385 | TGTCCATGGGTCCTAATTTCA | 454 |
| cMOAT, ATP-binding cassette sub-family C member 2 | 386 | TGTCCATGGGTCCTAATTTCA | 455 |
| cMOAT, ATP-binding cassette sub-family C member 2 | 387 | CCCACTCCTCTGTCAAGTTCA | 456 |
| cMOAT, ATP-binding cassette sub-family C member 2 | 388 | ATGCAGCCTATTGCAAATGAA | 457 |
| cMOAT, ATP-binding cassette sub-family C member 2 | 389 | ATGCAGCCTATTGCAAATGAA | 458 |
| cMOAT, ATP-binding cassette sub-family C member 2 | 390 | ATGCAGCCTATTGCAAATGAA | 459 |
| cMOAT, ATP-binding cassette sub-family C member 2 | 391 | CCTCCTTTCTTCCCATGTTCT | 460 |
| cMOAT, ATP-binding cassette sub-family C member 2 | 392 | GATATAAAGGTGGGGTGGGAG | 461 |
| cMOAT, ATP-binding cassette sub-family C member 2 | 393 | GATATAAAGGTGGGGTGGGAG | 462 |
| cMOAT, ATP-binding cassette sub-family C member 2 | 394 | TTTTGCTACCTGCTACCCATG | 463 |
| cMOAT, ATP-binding cassette sub-family C member 2 | 395 | TATGTCCTGGGCACAAGTCTT | 464 |

[1114] TABLE IX

| GENE_DESCRIPTION | HGNC_ID | SNP_ID | EXON | REV_COMP | Target_Name |
|---|---|---|---|---|---|
| OATP2, solute carrier family 21 member 6 | SLC21A6 | PS100s1 | Exon5 | 1 | SLC21A6_X5a |
| OATP2, solute carrier family 21 member 6 | SLC21A6 | PS100s2 | Exon5 | 1 | SLC21A6_X5a |
| OATP2, solute carrier family 21 member 6 | SLC21A6 | PS100s3 | Intron5 | 1 | SLC21A6_X5a |
| OATP2, solute carrier family 21 member 6 | SLC21A6 | PS100s4 | Intron5 | 1 | SLC21A6_X5a |
| OATP2, solute carrier family 21 member 6 | SLC21A6 | PS100s5 | Intron5 | 1 | SLC21A6_X5a |
| OATP2, solute carrier family 21 member 6 | SLC21A6 | PS100s6 | Intron5 | 1 | SLC21A6_X5a |
| OATP2, solute carrier family 21 member 6 | SLC21A6 | PS100s7 | Exon15 | 1 | SLC21A6_X15_f2a |
| OATP2, solute carrier family 21 member 6 | SLC21A6 | PS100s8 | Intron5 | 1 | SLC21A6_X5a |
| OATP2, solute carrier family 21 member 6 | SLC21A6 | PS100s9 | Exon5 | 1 | SLC21A6_X5a |
| OATP2, solute carrier family 21 member 6 | SLC21A6 | PS100s10 | Intron1 | 1 | SLC21A6_X1a |
| OATP2, solute carrier family 21 member 6 | SLC21A6 | PS100s11 | Intron1 | 1 | SLC21A6_X1a |
| OATP2, solute carrier family 21 member 6 | SLC21A6 | PS100s12 | Intron1 | 1 | SLC21A6_X14a |
| OATP2, solute carrier family 21 member 6 | SLC21A6 | PS100s13 | Intron2 | 1 | SLC21A6_X2a |
| OATP2, solute carrier family 21 member 6 | SLC21A6 | PS100s14 | Intron2 | 1 | SLC21A6_X2a |
| OATP2, solute carrier family 21 member 6 | SLC21A6 | PS100s15 | Intron2 | 1 | SLC21A6_X2a |
| OATP2, solute carrier family 21 member 6 | SLC21A6 | PS100s16 | Intron2 | 1 | SLC21A6_X2a |
| OATP2, solute carrier family 21 member 6 | SLC21A6 | PS100s17 | Intron2 | 1 | SLC21A6_X2a |
| OATP2, solute carrier family 21 member 6 | SLC21A6 | PS100s18 | Intron2 | 1 | SLC21A6_X2a |
| OATP2, solute carrier family 21 member 6 | SLC21A6 | PS100s19 | Intron3 | 1 | SLC21A6_X3a |
| OATP2, solute carrier family 21 member 6 | SLC21A6 | PS100s20 | Intron3 | 1 | SLC21A6_X3a |
| OATP2, solute carrier family 21 member 6 | SLC21A6 | PS100s21 | Intron3 | 1 | SLC21A6_X3a |
| OATP2, solute carrier family 21 member 6 | SLC21A6 | PS100s22 | Intron3 | 1 | SLC21A6_X3a |
| OATP2, solute carrier family 21 member 6 | SLC21A6 | PS100s23 | Exon11 | 1 | SLC21A6_X11a |
| OATP2, solute carrier family 21 member 6 | SLC21A6 | PS100s24 | Intron11 | 1 | SLC21A6_X11a |
| OATP2, solute carrier family 21 member 6 | SLC21A6 | PS100s25 | Exon10 | 1 | SLC21A6_X10 |
| OATP2, solute carrier family 21 member 6 | SLC21A6 | PS100s26 | Exon10 | 1 | SLC21A6_X10 |
| OATP2, solute carrier family 21 member 6 | SLC21A6 | PS100s27 | Intron9 | 1 | SLC21A6_X10 |
| OATP2, solute carrier family 21 member 6 | SLC21A6 | PS100s28 | Intron11 | 1 | SLC21A6_X12a |
| OATP2, solute carrier family 21 member 6 | SLC21A6 | PS100s29 | Exon6 | 1 | SLC21A6_X6a |
| OATP2, solute carrier family 21 member 6 | SLC21A6 | PS100s30 | Exon6 | 1 | SLC21A6_X6a |
| OATP2, solute carrier family 21 member 6 | SLC21A6 | PS100s31 | Exon6 | 1 | SLC21A6_X6a |
| OATP2, solute carrier family 21 member 6 | SLC21A6 | PS100s32 | Intron7 | 1 | SLC21A6_X7a |
| OATP2, solute carrier family 21 member 6 | SLC21A6 | PS100s33 | Exon15 | 1 | SLC21A6_X15_f1a |
| OATP2, solute carrier family 21 member 6 | SLC21A6 | PS100s34 | Exon15 | 1 | SLC21A6_X15_f1a |
| OATP2, solute carrier family 21 member 6 | SLC21A6 | PS100s35 | Exon15 | 1 | SLC21A6_X15_f1a |
| OATP2, solute carrier family 21 member 6 | SLC21A6 | PS100s36 | Exon15 | 1 | SLC21A6_X15_f2a |
| cMOAT, ATP-binding cassette sub-family C member 2 | ABCC2 | PS101s1 | Exon25 | 1 | ABCC2_X25a |
| cMOAT, ATP-binding cassette sub-family C member 2 | ABCC2 | PS101s2 | Exon28 | 1 | ABCC2_X28a |
| cMOAT, ATP-binding cassette sub-family C member 2 | ABCC2 | PS101s3 | Intron29 | 1 | ABCC2_X29a |
| cMOAT, ATP-binding cassette sub-family C member 2 | ABCC2 | PS101s4 | Exon29 | 1 | ABCC2_X29a |
| cMOAT, ATP-binding cassette sub-family C member 2 | ABCC2 | PS101s5 | Exon29 | 1 | ABCC2_X29a |
| cMOAT, ATP-binding cassette sub-family C member 2 | ABCC2 | PS101s6 | Exon31 | 1 | ABCC2_X31a |
| cMOAT, ATP-binding cassette sub-family C member 2 | ABCC2 | PS101s7 | Exon31 | 1 | ABCC2_X31a |
| cMOAT, ATP-binding cassette sub-family C member 2 | ABCC2 | PS101s8 | Intron31 | 1 | ABCC2_X31a |
| cMOAT, ATP-binding cassette sub-family C member 2 | ABCC2 | PS101s9 | Intron31 | 1 | ABCC2_X31a |
| cMOAT, ATP-binding cassette sub-family C member 2 | ABCC2 | PS101s10 | Exon25 | 1 | ABCC2_X25a |
| cMOAT, ATP-binding cassette sub-family C member 2 | ABCC2 | PS101s11 | Exon21 | 1 | ABCC2_X21a |
| cMOAT, ATP-binding cassette sub-family C member 2 | ABCC2 | PS101s12 | Intron21 | 1 | ABCC2_X21a |
| cMOAT, ATP-binding cassette sub-family C member 2 | ABCC2 | PS101s13 | Exon3 | 1 | ABCC2_X3a |
| cMOAT, ATP-binding cassette sub-family C member 2 | ABCC2 | PS101s14 | Intron12 | 1 | ABCC2_X13a |
| cMOAT, ATP-binding cassette sub-family C member 2 | ABCC2 | PS101s15 | Intron15 | 1 | ABCC2_X15a |
| cMOAT, ATP-binding cassette sub-family C member 2 | ABCC2 | PS101s16 | Intron15 | 1 | ABCC2_X15a |
| cMOAT, ATP-binding cassette sub-family C member 2 | ABCC2 | PS101s17 | Intron15 | 1 | ABCC2_X20a |
| cMOAT, ATP-binding cassette sub-family C member 2 | ABCC2 | PS101s18 | Intron15 | 1 | ABCC2_X20a |
| cMOAT, ATP-binding cassette sub-family C member 2 | ABCC2 | PS101s19 | Exon1 | 1 | ABCC2_X1a |
| cMOAT, ATP-binding cassette sub-family C member 2 | ABCC2 | PS101s20 | Intron20 | 1 | ABCC2_X27a |
| cMOAT, ATP-binding cassette sub-family C member 2 | ABCC2 | PS101s21 | Intron12 | 1 | ABCC2_X12a |
| cMOAT, ATP-binding cassette sub-family C member 2 | ABCC2 | PS101s22 | Exon16 | 1 | ABCC2_X16a |
| cMOAT, ATP-binding cassette sub-family C member 2 | ABCC2 | PS101s23 | Exon10 | 1 | ABCC2_X10a |
| cMOAT, ATP-binding cassette sub-family C member 2 | ABCC2 | PS101s24 | Exon10 | 1 | ABCC2_X10a |
| cMOAT, ATP-binding cassette sub-family C member 2 | ABCC2 | PS101s25 | Intron6 | 1 | ABCC2_X7a |
| cMOAT, ATP-binding cassette sub-family C member 2 | ABCC2 | PS101s26 | Intron24 | 1 | ABCC2_X24a |
| cMOAT, ATP-binding cassette sub-family C member 2 | ABCC2 | PS101s27 | Intron24 | 1 | ABCC2_X24a |
| cMOAT, ATP-binding cassette sub-family C member 2 | ABCC2 | PS101s28 | Intron24 | 1 | ABCC2_X24a |
| cMOAT, ATP-binding cassette sub-family C member 2 | ABCC2 | PS101s29 | Intron3 | 1 | ABCC2_X4a |
| cMOAT, ATP-binding cassette sub-family C member 2 | ABCC2 | PS101s30 | Intron19 | 1 | ABCC2_X19a |
| cMOAT, ATP-binding cassette sub-family C member 2 | ABCC2 | PS101s31 | Intron19 | 1 | ABCC2_X19a |
| cMOAT, ATP-binding cassette sub-family C member 2 | ABCC2 | PS101s32 | Exon22 | 1 | ABCC2_X22a |
| cMOAT, ATP-binding cassette sub-family C member 2 | ABCC2 | PS101s33 | Intron23 | 1 | ABCC2_X23a |

| | | | Forward |
|---|---|---|---|
| | | | Sequencing |
| | | Forward_Seq_{—} | Primer |
| GENE_DESCRIPTION | Forward Sequencing Primer | Name | (SEQ ID NO:) |
| OATP2, solute carrier family 21 member 6 | CTGTGTTGTTAATGGGCGAAC | PS100p51 | 465 |
| OATP2, solute carrier family 21 member 6 | CTGTGTTGTTAATGGGCGAAC | PS100p51 | 466 |
| OATP2, solute carrier family 21 member 6 | CTGTGTTGTTAATGGGCGAAC | PS100p51 | 467 |
| OATP2, solute carrier family 21 member 6 | CTGTGTTGTTAATGGGCGAAC | PS100p51 | 468 |
| OATP2, solute carrier family 21 member 6 | CTGTGTTGTTAATGGGCGAAC | PS100p51 | 469 |
| OATP2, solute carrier family 21 member 6 | CTGTGTTGTTAATGGGCGAAC | PS100p51 | 470 |
| OATP2, solute carrier family 21 member 6 | TTCAAACTCTGTGTTTGTTTGTTT | PS100p7 | 471 |
| OATP2, solute carrier family 21 member 6 | CTGTGTTGTTAATGGGCGAAC | PS100p51 | 472 |
| OATP2, solute carrier family 21 member 6 | CTGTGTTGTTAATGGGCGAAC | PS100p51 | 473 |
| OATP2, solute carrier family 21 member 6 | AAGGGCTCAGAATGTAAGCGT | PS100p67 | 474 |
| OATP2, solute carrier family 21 member 6 | AAGGGCTCAGAATGTAAGCGT | PS100p67 | 475 |
| OATP2, solute carrier family 21 member 6 | CCATACTGCATGCAAAGTCAG | PS100p15 | 476 |
| OATP2, solute carrier family 21 member 6 | CATCAAAAATTTCGCCAAAGA | PS100p63 | 477 |
| OATP2, solute carrier family 21 member 6 | CATCAAAAATTTCGCCAAAGA | PS100p63 | 478 |
| OATP2, solute carrier family 21 member 6 | CATCAAAAATTTCGCCAAAGA | PS100p63 | 479 |
| OATP2, solute carrier family 21 member 6 | CATCAAAAATTTCGCCAAAGA | PS100p63 | 480 |
| OATP2, solute carrier family 21 member 6 | CATCAAAAATTTCGCCAAAGA | PS100p63 | 481 |
| OATP2, solute carrier family 21 member 6 | CATCAAAAATTTCGCCAAAGA | PS100p63 | 482 |
| OATP2, solute carrier family 21 member 6 | GCAGTACCCCTGACCTCTACC | PS100p59 | 483 |
| OATP2, solute carrier family 21 member 6 | GCAGTACCCCTGACCTCTACC | PS100p59 | 484 |
| OATP2, solute carrier family 21 member 6 | GCAGTACCCCTGACCTCTACC | PS100p59 | 485 |
| OATP2, solute carrier family 21 member 6 | GCAGTACCCCTGACCTCTACC | PS100p59 | 486 |
| OATP2, solute carrier family 21 member 6 | CATCACACCCATCACAATAACA | PS100p27 | 487 |
| OATP2, solute carrier family 21 member 6 | CATCACACCCATCACAATAACA | PS100p27 | 488 |
| OATP2, solute carrier family 21 member 6 | TTTGATGGTTAACATATTATGCAATT | PS100p31 | 489 |
| OATP2, solute carrier family 21 member 6 | TTTGATGGTTAACATATTATGCAATT | PS100p31 | 490 |
| OATP2, solute carrier family 21 member 6 | TTTGATGGTTAACATATTATGCAATT | PS100p31 | 491 |
| OATP2, solute carrier family 21 member 6 | TGAAATATGAATTTGAATTCCCAG | PS100p23 | 492 |
| OATP2, solute carrier family 21 member 6 | GTAAAGCCAATGATTGGACCA | PS100p47 | 493 |
| OATP2, solute carrier family 21 member 6 | GTAAAGCCAATGATTGGACCA | PS100p47 | 494 |
| OATP2, solute carrier family 21 member 6 | GTAAAGCCAATGATTGGACCA | PS100p47 | 495 |
| OATP2, solute carrier family 21 member 6 | TGTTTTTCGCATGTGTGCTTA | PS100p43 | 496 |
| OATP2, solute carrier family 21 member 6 | GCCCACTGGAAACTTAACACA | PS100p3 | 497 |
| OATP2, solute carrier family 21 member 6 | GCCCACTGGAAACTTAACACA | PS100p3 | 498 |
| OATP2, solute carrier family 21 member 6 | GCCCACTGGAAACTTAACACA | PS100p3 | 499 |
| OATP2, solute carrier family 21 member 6 | TTCAAACTCTGTGTTTGTTTGTTT | PS100p7 | 500 |
| cMOAT, ATP-binding cassette sub-family C member 2 | ATTTCACACCACTAGCCATGC | PS101p35 | 501 |
| cMOAT, ATP-binding cassette sub-family C member 2 | ACAGCTGCGGTAAGTCTGTGT | PS101p23 | 502 |
| cMOAT, ATP-binding cassette sub-family C member 2 | TGGAATTGACAGTGCTGACTG | PS101p19 | 503 |
| cMOAT, ATP-binding cassette sub-family C member 2 | TGGAATTGACAGTGCTGACTG | PS101p19 | 504 |
| cMOAT, ATP-binding cassette sub-family C member 2 | TGGAATTGACAGTGCTGACTG | PS101p19 | 505 |
| cMOAT, ATP-binding cassette sub-family C member 2 | TAAACCTTCTGCCATCAGGTG | PS101p11 | 506 |
| cMOAT, ATP-binding cassette sub-family C member 2 | TAAACCTTCTGCCATCAGGTG | PS101p11 | 507 |
| cMOAT, ATP-binding cassette sub-family C member 2 | TAAACCTTCTGCCATCAGGTG | PS101p11 | 508 |
| cMOAT, ATP-binding cassette sub-family C member 2 | TAAACCTTCTGCCATCAGGTG | PS101p11 | 509 |
| cMOAT, ATP-binding cassette sub-family C member 2 | ATTTCACACCACTAGCCATGC | PS101p35 | 510 |
| cMOAT, ATP-binding cassette sub-family C member 2 | GGATGAGGACATTCACAGGAA | PS101p51 | 511 |
| cMOAT, ATP-binding cassette sub-family C member 2 | GGATGAGGACATTCACAGGAA | PS101p51 | 512 |
| cMOAT, ATP-binding cassette sub-family C member 2 | AAATTTGTTTCACCCCATTCC | PS101p123 | 513 |
| cMOAT, ATP-binding cassette sub-family C member 2 | GTCAAACCATTGGTCTCCAGA | PS101p83 | 514 |
| cMOAT, ATP-binding cassette sub-family C member 2 | ATGGCAAATGCAGTTATCAGG | PS101p75 | 515 |
| cMOAT, ATP-binding cassette sub-family C member 2 | ATGGCAAATGCAGTTATCAGG | PS101p75 | 516 |
| cMOAT, ATP-binding cassette sub-family C member 2 | AAGGAAGAGCTTGGAGTGTCC | PS101p55 | 517 |
| cMOAT, ATP-binding cassette sub-family C member 2 | AAGGAAGAGCTTGGAGTGTCC | PS101p55 | 518 |
| cMOAT, ATP-binding cassette sub-family C member 2 | TTCTGGTTCTTGTTGGTGACC | PS101p131 | 519 |
| cMOAT, ATP-binding cassette sub-family C member 2 | GATGCACTCTCGAAGGAGTTG | PS101p27 | 520 |
| cMOAT, ATP-binding cassette sub-family C member 2 | GGCCTAGAGATGCCAGCTAGT | PS101p87 | 521 |
| cMOAT, ATP-binding cassette sub-family C member 2 | ACTAGCCCTCAGTGCCTTCTC | PS101p71 | 522 |
| cMOAT, ATP-binding cassette sub-family C member 2 | GCCCAAACTCCCATTAAGAAT | PS101p95 | 523 |
| cMOAT, ATP-binding cassette sub-family C member 2 | GCCCAAACTCCCATTAAGAAT | PS101p95 | 524 |
| cMOAT, ATP-binding cassette sub-family C member 2 | TGATGTACCCTTGCCTGAAAC | PS101p107 | 525 |
| cMOAT, ATP-binding cassette sub-family C member 2 | ACTAAATGGCAAAGCTGCTGA | PS101p39 | 526 |
| cMOAT, ATP-binding cassette sub-family C member 2 | ACTAAATGGCAAAGCTGCTGA | PS101p39 | 527 |
| cMOAT, ATP-binding cassette sub-family C member 2 | ACTAAATGGCAAAGCTGCTGA | PS101p39 | 528 |
| cMOAT, ATP-binding cassette sub-family C member 2 | GCCTTTTGTCCAAAGGAAGTC | PS101p119 | 529 |
| cMOAT, ATP-binding cassette sub-family C member 2 | CACAGAACCCAGAAAGCAGAG | PS101p59 | 530 |
| cMOAT, ATP-binding cassette sub-family C member 2 | CACAGAACCCAGAAAGCAGAG | PS101p59 | 531 |
| cMOAT, ATP-binding cassette sub-family C member 2 | ACTTGTGCCCAGGACATAATG | PS101p47 | 532 |
| cMOAT, ATP-binding cassette sub-family C member 2 | TGAACAGTGTTGTCTAGGGGG | PS101p43 | 533 |

| | | | Reverse |
|---|---|---|---|
| | | | Sequencing |
| | | Reverse_{—} | Primer (SEQ |
| | | Seq_{—} | ID |
| GENE_DESCRIPTION | Reverse Sequencing Primer | Name | NO:) |
| OATP2, solute carrier family 21 member 6 | ATGGTGCAAATAAAGGGGAAT | PS100p52 | 534 |
| OATP2, solute carrier family 21 member 6 | ATGGTGCAAATAAAGGGGAAT | PS100p52 | 535 |
| OATP2, solute carrier family 21 member 6 | ATGGTGCAAATAAAGGGGAAT | PS100p52 | 536 |
| OATP2, solute carrier family 21 member 6 | ATGGTGCAAATAAAGGGGAAT | PS100p52 | 537 |
| OATP2, solute carrier family 21 member 6 | ATGGTGCAAATAAAGGGGAAT | PS100p52 | 538 |
| OATP2, solute carrier family 21 member 6 | ATGGTGCAAATAAAGGGGAAT | PS100p52 | 539 |
| OATP2, solute carrier family 21 member 6 | GTTTCCAAACAGCATTGCATT | PS100p8 | 540 |
| OATP2, solute carrier family 21 member 6 | ATGGTGCAAATAAAGGGGAAT | PS100p52 | 541 |
| OATP2, solute carrier family 21 member 6 | ATGGTGCAAATAAAGGGGAAT | PS100p52 | 542 |
| OATP2, solute carrier family 21 member 6 | TGGCAACTGGAGTGAACTCTT | PS100p68 | 543 |
| OATP2, solute carrier family 21 member 6 | TGGCAACTGGAGTGAACTCTT | PS100p68 | 544 |
| OATP2, solute carrier family 21 member 6 | CGAATCCTCCAAATTTTTGAAC | PS100p16 | 545 |
| OATP2, solute carrier family 21 member 6 | AGGTGATTGTTTCAAACTGAGC | PS100p64 | 546 |
| OATP2, solute carrier family 21 member 6 | AGGTGATTGTTTCAAACTGAGC | PS100p64 | 547 |
| OATP2, solute carrier family 21 member 6 | AGGTGATTGTTTCAAACTGAGC | PS100p64 | 548 |
| OATP2, solute carrier family 21 member 6 | AGGTGATTGTTTCAAACTGAGC | PS100p64 | 549 |
| OATP2, solute carrier family 21 member 6 | AGGTGATTGTTTCAAACTGAGC | PS100p64 | 550 |
| OATP2, solute carrier family 21 member 6 | AGGTGATTGTTTCAAACTGAGC | PS100p64 | 551 |
| OATP2, solute carrier family 21 member 6 | GATGTTCTTGGCAGCTCTGTC | PS100p60 | 552 |
| OATP2, solute carrier family 21 member 6 | GATGTTCTTGGCAGCTCTGTC | PS100p60 | 553 |
| OATP2, solute carrier family 21 member 6 | GATGTTCTTGGCAGCTCTGTC | PS100p60 | 554 |
| OATP2, solute carrier family 21 member 6 | GATGTTCTTGGCAGCTCTGTC | PS100p60 | 555 |
| OATP2, solute carrier family 21 member 6 | CTTCTTCCTTCTCCTCCCCTT | PS100p28 | 556 |
| OATP2, solute carrier family 21 member 6 | CTTCTTCCTTCTCCTCCCCTT | PS100p28 | 557 |
| OATP2, solute carrier family 21 member 6 | CATGCACATTCTGCACATGTA | PS100p32 | 558 |
| OATP2, solute carrier family 21 member 6 | CATGCACATTCTGCACATGTA | PS100p32 | 559 |
| OATP2, solute carrier family 21 member 6 | CATGCACATTCTGCACATGTA | PS100p32 | 560 |
| OATP2, solute carrier family 21 member 6 | TGCAATGTATTTGCAGCACTG | PS100p24 | 561 |
| OATP2, solute carrier family 21 member 6 | GGTTGTTTAAAGGAATCTGGG | PS100p48 | 562 |
| OATP2, solute carrier family 21 member 6 | GGTTGTTTAAAGGAATCTGGG | PS100p48 | 563 |
| OATP2, solute carrier family 21 member 6 | GGTTGTTTAAAGGAATCTGGG | PS100p48 | 564 |
| OATP2, solute carrier family 21 member 6 | TAAGAACCATGCATTCTTGGC | PS100p44 | 565 |
| OATP2, solute carrier family 21 member 6 | AAACAAATGAGTATCATACAGGTAGAGG | PS100p4 | 566 |
| OATP2, solute carrier family 21 member 6 | AAACAAATGAGTATCATACAGGTAGAGG | PS100p4 | 567 |
| OATP2, solute carrier family 21 member 6 | AAACAAATGAGTATCATACAGGTAGAGG | PS100p4 | 568 |
| OATP2, solute carrier family 21 member 6 | GTTTCCAAACAGCATTGCATT | PS100p8 | 569 |
| cMOAT, ATP-binding cassette sub-family C member 2 | AGAAAGGAGGAAGATGGTGGA | PS101p3 | 570 |
| cMOAT, ATP-binding cassette sub-family C member 2 | CTCATCTTGTCTCCTTGCCAG | PS101p24 | 571 |
| cMOAT, ATP-binding cassette sub-family C member 2 | CACTGCCTCTTACCTCCTGTG | PS101p20 | 572 |
| cMOAT, ATP-binding cassette sub-family C member 2 | CACTGCCTCTTACCTCCTGTG | PS101p20 | 573 |
| cMOAT, ATP-binding cassette sub-family C member 2 | CACTGCCTCTTACCTCCTGTG | PS101p20 | 574 |
| cMOAT, ATP-binding cassette sub-family C member 2 | TGCGTCTTTCCTTGGTCTTTA | PS101p12 | 575 |
| cMOAT, ATP-binding cassette sub-family C member 2 | TGCGTCTTTCCTTGGTCTTTA | PS101p12 | 576 |
| cMOAT, ATP-binding cassette sub-family C member 2 | TGCGTCTTTCCTTGGTCTTTA | PS101p12 | 577 |
| cMOAT, ATP-binding cassette sub-family C member 2 | TGCGTCTTTCCTTGGTCTTTA | PS101p12 | 578 |
| cMOAT, ATP-binding cassette sub-family C member 2 | AGAAAGGAGGAAGATGGTGGA | PS101p36 | 579 |
| cMOAT, ATP-binding cassette sub-family C member 2 | CAGTTCTAGGTCCAATGGCAG | PS101p52 | 580 |
| cMOAT, ATP-binding cassette sub-family C member 2 | CAGTTCTAGGTCCAATGGCAG | PS101p52 | 581 |
| cMOAT, ATP-binding cassette sub-family C member 2 | TCACTGCATACCGTTTTTCCT | PS101p124 | 582 |
| cMOAT, ATP-binding cassette sub-family C member 2 | TGCTTGGTCCCTTTTAGGAAT | PS101p84 | 583 |
| cMOAT, ATP-binding cassette sub-family C member 2 | ATGGAGAAAGCGGAGAGAGAC | PS101p76 | 584 |
| cMOAT, ATP-binding cassette sub-family C member 2 | ATGGAGAAAGCGGAGAGAGAC | PS101p76 | 585 |
| cMOAT, ATP-binding cassette sub-family C member 2 | CTTGCTGAAACCAGCAAGATC | PS101p56 | 586 |
| cMOAT, ATP-binding cassette sub-family C member 2 | CTTGCTGAAACCAGCAAGATC | PS101p56 | 587 |
| cMOAT, ATP-binding cassette sub-family C member 2 | GGCCTCTTGTACTTTGGGAAC | PS101p132 | 588 |
| cMOAT, ATP-binding cassette sub-family C member 2 | CGCGTGAGCACCTAATTAGTC | PS101p28 | 589 |
| cMOAT, ATP-binding cassette sub-family C member 2 | GGGCAATCATGTGAGCTGTAT | PS101p88 | 590 |
| cMOAT, ATP-binding cassette sub-family C member 2 | ACCCCTGCTATCTCCTTCAAA | PS101p72 | 591 |
| cMOAT, ATP-binding cassette sub-family C member 2 | AGGCATTGACCCTATCCAACT | PS101p96 | 592 |
| cMOAT, ATP-binding cassette sub-family C member 2 | AGGCATTGACCCTATCCAACT | PS101p96 | 593 |
| cMOAT, ATP-binding cassette sub-family C member 2 | CTGTCCCTCTATCCCAGAACC | PS101p108 | 594 |
| cMOAT, ATP-binding cassette sub-family C member 2 | ACTGGGAACACACAGAATCCA | PS101p40 | 595 |
| cMOAT, ATP-binding cassette sub-family C member 2 | ACTGGGAACACACAGAATCCA | PS101p40 | 596 |
| cMOAT, ATP-binding cassette sub-family C member 2 | ACTGGGAACACACAGAATCCA | PS101p40 | 597 |
| cMOAT, ATP-binding cassette sub-family C member 2 | GACATCCTTCTCCCCTCAGTC | PS101p120 | 598 |
| cMOAT, ATP-binding cassette sub-family C member 2 | TGGCAAGTAAGACAGGGAAGA | PS101p60 | 599 |
| cMOAT, ATP-binding cassette sub-family C member 2 | TGGCAAGTAAGACAGGGAAGA | PS101p60 | 600 |
| cMOAT, ATP-binding cassette sub-family C member 2 | CTCCTTGTGGTTGGCATTCTA | PS101p48 | 601 |
| cMOAT, ATP-binding cassette sub-family C member 2 | GCTGACAAAACTGCTTCCATC | PS101p44 | 602 |

[1115] TABLE X

| | | ORCHID_{—} | |
|---|---|---|---|
| | | LEFT (SEQ | |
| SNP_ID | ORCHID_LEFT | ID NO:) | ORCHID_RIGHT |
| PS100s1 | N/A | N/A | N/A |
| PS100s2 | TGCTAATGAATATCACAACAATTTTTAGAG | 620 | TCGACCTTATCCACTTGTTTAATT |
| PS100s3 | N/A | N/A | N/A |
| PS100s4 | N/A | N/A | N/A |
| PS100s5 | N/A | N/A | N/A |
| PS100s6 | N/A | N/A | N/A |
| PS100s7 | N/A | N/A | N/A |
| PS100s8 | N/A | N/A | N/A |
| PS100s9 | GGTGATGCTCTATTGAGTGATAAAATTT | 621 | GTGATGTTCTTACAGTTACAGGTATTCTAAAG |
| PS100s10 | N/A | N/A | N/A |
| PS100s11 | N/A | N/A | N/A |
| PS100s12 | N/A | N/A | N/A |
| PS100s13 | N/A | N/A | N/A |
| PS100s14 | N/A | N/A | N/A |
| PS100s15 | N/A | N/A | N/A |
| PS100s16 | N/A | N/A | N/A |
| PS100s17 | N/A | N/A | N/A |
| PS100s18 | N/A | N/A | N/A |
| PS100s19 | N/A | N/A | N/A |
| PS100s20 | N/A | N/A | N/A |
| PS100s21 | N/A | N/A | N/A |
| PS100s22 | N/A | N/A | N/A |
| PS100s23 | TTTTGAATAAGGAGAGGAAAGTAAAA | 622 | GAATAACTTACATCTCACCCTGTCTAG |
| PS100s24 | N/A | N/A | N/A |
| PS100s25 | N/A | N/A | N/A |
| PS100s26 | GACATCACAGCAGTAAAACATGAGA | 623 | AGGAGTCATAACCATACCTATTTTTGC |
| PS100s27 | N/A | N/A | N/A |
| PS100s28 | N/A | N/A | N/A |
| PS100s29 | CCCAATGGTACTATGGGAGTCTC | 624 | CATAGGTTGTTTAAAGGAATCTGGG |
| PS100s30 | CATTACCTAAATACAAAGAAGAATGTCCTT | 625 | TGGGTAATATGCTTCGTGGAATAG |
| PS100s31 | N/A | N/A | N/A |
| PS100s32 | N/A | N/A | N/A |
| PS100s33 | N/A | N/A | N/A |
| PS100s34 | N/A | N/A | N/A |
| PS100s35 | N/A | N/A | N/A |
| PS100s36 | N/A | N/A | N/A |
| PS101s1 | CTCACCTGTTGGAGGTGATCC | 626 | GTATCAGGTTTGCCAGTTATCCG |
| PS101s2 | N/A | N/A | N/A |
| PS101s3 | N/A | N/A | N/A |
| PS101s4 | N/A | N/A | N/A |
| PS101s5 | N/A | N/A | N/A |
| PS101s6 | N/A | N/A | N/A |
| PS101s7 | N/A | N/A | N/A |
| PS101s8 | N/A | N/A | N/A |
| PS101s9 | N/A | N/A | N/A |
| PS101s10 | N/A | N/A | N/A |
| PS101s11 | N/A | N/A | N/A |
| PS101s12 | N/A | N/A | N/A |
| PS101s13 | N/A | N/A | N/A |
| PS101s14 | N/A | N/A | N/A |
| PS101s15 | N/A | N/A | N/A |
| PS101s16 | N/A | N/A | N/A |
| PS101s17 | N/A | N/A | N/A |
| PS101s18 | N/A | N/A | N/A |
| PS101s19 | N/A | N/A | N/A |
| PS101s20 | N/A | N/A | N/A |
| PS101s21 | N/A | N/A | N/A |
| PS101s22 | ATTTTCCATTTCTCCCAGCAT | 627 | CTTTCAGTGTGAACCTGGACATTAT |
| PS101s23 | TGCATGAAGTTGGTCACATCC | 628 | CCTAATTTCAATCCTTATCTTTAGGCA |
| PS101s24 | N/A | N/A | N/A |
| PS101s25 | N/A | N/A | N/A |
| PS101s26 | N/A | N/A | N/A |
| PS101s27 | N/A | N/A | N/A |
| PS101s28 | N/A | N/A | N/A |
| PS101s29 | N/A | N/A | N/A |
| PS101s30 | N/A | N/A | N/A |
| PS101s31 | N/A | N/A | N/A |
| PS101s32 | N/A | N/A | N/A |
| PS101s33 | N/A | N/A | N/A |

| SNP_ID | ORCHID_RIGHT (SEQ ID NO:) | ORCHID_SNPIT | ORCHID_SNPIT (SEQ ID NO:) |
|---|---|---|---|
| PS100s1 | N/A | N/A | N/A |
| PS100s2 | 629 | TTCTTACCTTTTCCCACTATCTCAG | 638 |
| PS100s3 | N/A | N/A | N/A |
| PS100s4 | N/A | N/A | N/A |
| PS100s5 | N/A | N/A | N/A |
| PS100s6 | N/A | N/A | N/A |
| PS100s7 | N/A | N/A | N/A |
| PS100s8 | N/A | N/A | N/A |
| PS100s9 | 630 | GTCGATGTTGAATTTTCTGATGAAT | 639 |
| PS100s10 | N/A | N/A | N/A |
| PS100s11 | N/A | N/A | N/A |
| PS100s12 | N/A | N/A | N/A |
| PS100s13 | N/A | N/A | N/A |
| PS100s14 | N/A | N/A | N/A |
| PS100s15 | N/A | N/A | N/A |
| PS100s16 | N/A | N/A | N/A |
| PS100s17 | N/A | N/A | N/A |
| PS100s18 | N/A | N/A | N/A |
| PS100s19 | N/A | N/A | N/A |
| PS100s20 | N/A | N/A | N/A |
| PS100s21 | N/A | N/A | N/A |
| PS100s22 | N/A | N/A | N/A |
| PS100s23 | 631 | TTTATTGCCACTTGAAGATTTGCAA | 640 |
| PS100s24 | N/A | N/A | N/A |
| PS100s25 | N/A | N/A | N/A |
| PS100s26 | 632 | TGGCAATTCCAACGGTGTTCAGTTT | 641 |
| PS100s27 | N/A | N/A | N/A |
| PS100s28 | N/A | N/A | N/A |
| PS100s29 | 633 | N/A | N/A |
| PS100s30 | 634 | AAATCATCAATGTAAGAAAGCCCCA | 642 |
| PS100s31 | N/A | N/A | N/A |
| PS100s32 | N/A | N/A | N/A |
| PS100s33 | N/A | N/A | N/A |
| PS100s34 | N/A | N/A | N/A |
| PS100s35 | N/A | N/A | N/A |
| PS100s36 | N/A | N/A | N/A |
| PS101s1 | 635 | ACATTTCTGGTTGGTGTCAATCCTC | 643 |
| PS101s2 | N/A | N/A | N/A |
| PS101s3 | N/A | N/A | N/A |
| PS101s4 | N/A | N/A | N/A |
| PS101s5 | N/A | N/A | N/A |
| PS101s6 | N/A | N/A | N/A |
| PS101s7 | N/A | N/A | N/A |
| PS101s8 | N/A | N/A | N/A |
| PS101s9 | N/A | N/A | N/A |
| PS101s10 | N/A | N/A | N/A |
| PS101s11 | N/A | N/A | N/A |
| PS101s12 | N/A | N/A | N/A |
| PS101s13 | N/A | N/A | N/A |
| PS101s14 | N/A | N/A | N/A |
| PS101s15 | N/A | N/A | N/A |
| PS101s16 | N/A | N/A | N/A |
| PS101s17 | N/A | N/A | N/A |
| PS101s18 | N/A | N/A | N/A |
| PS101s19 | N/A | N/A | N/A |
| PS101s20 | N/A | N/A | N/A |
| PS101s21 | N/A | N/A | N/A |
| PS101s22 | 636 | TTATGGCAGGNCAACTTGTGGCTGTGA | 644 |
| PS101s23 | 637 | GACATCAGGTTCACTGTTTCTCCAA | 645 |
| PS101s24 | N/A | N/A | N/A |
| PS101s25 | N/A | N/A | N/A |
| PS101s26 | N/A | N/A | N/A |
| PS101s27 | N/A | N/A | N/A |
| PS101s28 | N/A | N/A | N/A |
| PS101s29 | N/A | N/A | N/A |
| PS101s30 | N/A | N/A | N/A |
| PS101s31 | N/A | N/A | N/A |
| PS101s32 | N/A | N/A | N/A |
| PS101s33 | N/A | N/A | N/A |

[1116] TABLE XI

| | | GBS_LEFT | | GBS_RIGHT |
|---|---|---|---|---|
| SNP_ID | GBS_LEFT | (SEQ ID NO:) | GBS_RIGHT | (SEQ ID NO:) |
| PS100s1 | TGTAAAACGACGGCCAGTCTGTGTTGTTAATGGGCGAAAC | 646 | CAGGAAACAGCTATGACCATGGTGCAAATAAAGGGGAAT | 715 |
| PS100s2 | TGTAAAACGACGGCCAGTCTGTGTTGTTAATGGGCGAAAC | 647 | CAGGPAACAGCTATGACCATGGTGCAAATMAGGGGAAT | 716 |
| PS100s3 | TGTAAAACGACGGCCAGTGGCCCTGTTCAATCCAAATAT | 648 | CAGGWCAGCTATGACCGCATCACCTGAGATAGTGGGA | 717 |
| PS100s4 | TGTAAAACGACGGCCAGTGGCCCTGTTCAATCCAAATAT | 649 | CAGGAAACAGCTATGACCGCATCACCTGAGATAGTGGGA | 718 |
| PS100s5 | TGTAAAACGACGGCCAGTGAATTTGTTACAGGGCTGCCT | 650 | CAGGAAACAGCTATGACGGCATCACCTGAGATAGTGGGA | 719 |
| PS100s6 | TGTPAAACGACGGCCAGTGAATTTGTTACAGGGCTGCCT | 651 | CAGGAAACAGCTATGACCGCATCACCTGAGATAGTGGGA | 720 |
| PS100s7 | TGTAAAACGACGGCCAGTGCTCCTCCTTTTTAACCTCTACC | 652 | CAGGAAACAGCTATGACCGTTTCCAAAGAGCATTGCATT | 721 |
| PS100s8 | TGTAAAACGACGGCCAGTCTGTGTTGTTAATGGGCGAAC | 653 | CAGGAAACAGCTATGACCATGGTGCAAATAAAGGGGAAT | 722 |
| PS100s9 | TGTAAAACGACGGCCAGTCTGTGTTGTTAATGGGCGAAC | 654 | CAGGAAACAGCTATGACCATGGTGGAAATAAAGGGGAAT | 723 |
| PS100s10 | TGTAAAACGACGGCCAGTGGCTCTTCTACTCCCAGAAGG | 655 | CAGGAMCAGCTATGACCTGGCAACTGGAGTGMCTCTT | 724 |
| PS1G0s11 | TGTAAAACGACGGCCAGTACCTGAGGCTCTTCTACTCCC | 656 | CAGGAAACAGCTATGACCTGGCAACTGGAGTGAACTCTT | 725 |
| PS100s12 | TGTAAAACGACGGCCAGTTCCTTGAATCACAGTTTGTTCG | 657 | CAGGAAACAGCTATGACCTGGGGCTCGATTGATACAAC | 726 |
| PS1Q0s13 | TGTAAAACGACGGCCAGTCGTGATCAATCCAAAACCAAA | 658 | CAGGAAACAGCTATGACCTAAAACAGCAGAGGCACAACC | 727 |
| PS100s14 | TGTAAAACGACGGCCAGTTCAGTATCACAAAGTGAGTCTCAAG | 659 | CAGGAAACAGCTATGACCGAAAAGCAAGTTGTTAAAAAGAACA | 728 |
| PS1Q0s15 | TGTAAAACGACGGCCAGTTCAGTATCACAAAGTGAGTCTCAAG | 660 | CAGGAAACAGCTATGACCGAAAAGCAAGTTGTTAAAAAGAACA | 729 |
| PS100s16 | TGTAAAACGACGGCCAGTTCAGTATCACAAAGTGAGTCTCAAG | 661 | CAGGAAACAGCTATGACCGAAAAGCAAGTTGTTAAAAAGAACA | 730 |
| PS100s17 | TGTAAAACGACGGCCAGTTCAGTATCACAAAGTGAGTCTCAAG | 662 | CAGGAAACAGCTATGACCGAAAAGCAAGTTGTTAAAAAGAACA | 731 |
| PS100s18 | TGTAAAACGACGGCCAGTTCAGTATCACAAAGTGAGTCTCAAG | 663 | CAGGAAACAGCTATGACCGAAAAGCAAGTTGTTAAAAAGAACA | 732 |
| PS100s19 | TGTAAAACGACGGCCAGTCAGTACCCCTGACCTCTACCTT | 664 | CAGGAAACAGCTATGACCGCAGCTCTGTCACTCAGCTTT | 733 |
| PS100s20 | TGTAAAACGACGGCCAGTCAGGGTTTCTGMCATCCTCA | 665 | CAGGAAACAGCTATGACCTCTTGTTGGTTTTATTGACGGA | 734 |
| PS100s21 | TGTAAAACGACGGCCAGTTTCATCTTGAGAGAGGGGAGG | 666 | CAGGAAACAGCTATGACCTTGACGGAAGCTTTGAAATTG | 735 |
| PS100s22 | TGTAAAACGACGGCCAGTTCCCTGAGCTGTTATTGGAGA | 667 | CAGGAAACAGCTATGACCTTGTGGTTGTCATAACTGCACA | 736 |
| PS100s23 | TGTAAAACGACGGCCAGTCATCACACCCATCACMTMCAG | 668 | CAGGAAACAGCTATGACCTCTCCTCCCCTTCTTTGTCTT | 737 |
| PS100s24 | TGTAAAACGACGGCCAGTCCTGCTAGACAGGGTGAGATG | 669 | CAGGAAACAGCTATGACCCATTTCGTCATCATCAAAGCA | 738 |
| PS100s25 | TGTAAAACGACGGCCAGTGAAAGTTTAGTTAAAATTGTTTTCTGC | 670 | CAGGAAACAGCTATGACCTTGACATACATTGTGTTTCATCTATAAA | 739 |
| PS100s26 | TGTAAAACGACGGCCAGTCAAACCCATCATAGGTCATGG | 671 | CAGGAAACAGCTATGACCTTGACATACATTGTGTTTCATCTATAAA | 740 |
| PS100s27 | TGTAAAACGACGGCCAGTATTCCAACGGTGTTCAGTTTG | 672 | CAGGAAACAGCTATGACCGXAGCAAGGGGAGGAAGMC | 741 |
| PS100s28 | TGTAAAACGACGGCCAGTGGGCGATTCTTTTACAACTGA | 673 | CAGGAAACAGCTATGACCGCCCAAGAGATGATGCTTGTA | 742 |
| PS100s29 | TGTAAAACGACGGCCAGTGACAAAGGGAAAGTGATCATACAA | 674 | CAGGAAACAGCTATGACCTTGTCAAAGTTTGCPAAGTGA | 743 |
| PS100s30 | TGTAAAACGACGGCCAGTTAGATGCCAAGAATGCATGGT | 675 | CAGGAAACAGCTATGACCAAAATTAATGTTTAAAATGAAACACTCTC | 744 |
| PS100s31 | TGTAAAACGACGGCCAGTTAGATGCCPAGAATGCATGGT | 676 | CAGGAAACAGCTATGACCTGAAACACTCTCTTATCTACATAGGTTG | 745 |
| PS100s32 | TGTAAAACGACGGCCAGTTTGGACCAAGCTCATGAAAAT | 677 | CAGGAAACAGCTATGACCTAAGAACCATGCATTCTTGGC | 746 |
| PS100s33 | TGTAAAACGACGGCCAGTGCCCACTGGAAACTTAACACA | 678 | CAGGAPACAGCTATGACCGGTAGAGGTTAAAAAGGAGGAGC | 747 |
| PS100s34 | TGTAAAACGACGGCCAGTTTGACAATCACAGCTTGCAAA | 679 | CAGGAAACAGCTATGACCAPAGTGAGAGACATGGTTACTGTG | 748 |
| PS100s35 | TGTAAAACGACGGCCAGTTTGACAATCACAGCTTGCAAA | 680 | CAGGAAACAGCTATGACCAAAGTGAGAGACATGGTTACTGTG | 749 |
| PS100s36 | TGTAAAACGACGGCCAGTCCMGCTAGACTTCAGGCCTT | 681 | CAGGAMCAGCTATGACCTTTGAGGAGTTCCTGGTCCTT | 750 |
| PS101s1 | TGTAAAACGACGGCCAGTATTTCACACCACTAGCCATGC | 682 | CAGGAAACAGCTATGACCAGAAAGGAGGMGATGGTGGA | 751 |
| PS101s2 | TGTAAAACGACGGCCAGTACAGCTGCGGTAAGTCTGTGT | 683 | CAGGAAACAGCTATGACCCTCATCTTGTCTCCTTGCCAG | 752 |
| PS101s3 | TGTAAAACGACGGCCAGTGCAACGCTAAAGAATCGTCTG | 684 | CAGGAAACAGCTATGACCCCTCACAAACTGCCTCTTCAG | 753 |
| PS101s4 | TGTAAAACGACGGCCAGTTGGAATTGACAGTGCTGACTG | 685 | CAGGAAACAGGTATGACCCACTGCCTCTTACCTCCTGTG | 754 |
| PS101s5 | TGTAAAACGACGGCCAGTTGGAATTGACAGTGCTGACTG | 686 | CAGGAAACAGCTATGACCCACTGCCTCTTACCTCCTGTG | 755 |
| PS101s6 | TGTAAAACGACGGCCAGTTAAACCTTCTGCGATCAGGTG | 687 | CAGGAAACAGCTATGAGCGGGGGTTTTGAAAGTCTGATC | 756 |
| PS101s7 | TGTAAAACGACGGCCAGTGTTCGTTTTCATTTGCGTGAT | 688 | CAGGAAACAGCTATGACCAAATCCAAGATCCTGGTCCTG | 757 |
| PS101s8 | TGTAAAACGACGGCCAGTGTTCGTTTTCATTTGCGTGAT | 689 | CAGGAAACAGCTATGACCCTGCGGTGGATCTAGAGACAG | 758 |
| PS101s9 | TGTAAAACGACGGCCAGTTGAGGCTCAGGACAGTTAGGA | 690 | CAGGAAACAGCTATGACCCACTGCACAGTGATCACCATC | 759 |
| PS101s10 | TGTAAAACGACGGCCAGTATTTCACACCACTAGCCATGC | 691 | CAGGAAACAGCTATGACCAGAAAGGAGGAAGATGGTGGA | 760 |
| PS101s11 | TGTAAAACGACGGCCAGTATTTGCAAAGGACAGAGGACA | 692 | CAGGAAACAGCTATGACCATCTGCTTGCAAGMGACCCT | 761 |
| PS101s12 | TGTAAAACGACGGCCAGTCACAGCCTCTGCTAACAGGTT | 693 | CAGGMACAGCTATGACCATCTGCTTGCAAGAAGACGCT | 762 |
| PS101s13 | TGTAAAACGACGGCCAGTAAATTTGTTTCACCCCATACC | 694 | CAGGAXACAGCTATGACCTCACTGCATACCGTTTTTCCT | 763 |
| PS101s14 | TGTAAAACGACGGCCAGTTAATGGAGGTGAAGGCCTTTT | 695 | CAGGAAACAGCTATGAGCTGTGGTATCAGGAAGGATTGG | 764 |
| PS101s15 | TGTAAAACGACGGCCAGTAAGCCAGATTCCAATGTTCCT | 696 | CAGGAAACAGCTATGACCATTCTCACTGCCTGGCCTATT | 765 |
| PS101s16 | TGTAAAACGACGGCCAGTATCCACAATCTGCACACACAA | 697 | CAGGAAACAGCTATGACCCAGTTTTCTGAGGCCTCCTTT | 766 |
| PS101s17 | TGTAAAACGACGGCCAGTTTCGACGAAAGCTGTTCTCTC | 698 | CAGGAAACAGCTATGACCAAAGGAACCTGGGCATTTCTA | 767 |
| PS101s18 | TGTAAAACGACGGCCAGTTTCGACGAAAGCTGTTCTCTC | 699 | CAGGAAACAGCTATGAGCAAAGGAACGTGGGCATTTCTA | 768 |
| PS101s19 | TGTAAAACGACGGCCAGTTTCTGGTTCTTGTTGGTGACC | 700 | CAGGAAACAGCTATGACCGGCCTCTTGTACTTTGGGAAC | 769 |
| PS101s20 | TGTAAAACGACGGCCAGTGATGCACTCTCGAAGGAGTTG | 701 | CAGGAAACAGCTATGACCCGCGTGAGCACCTAATTAGTC | 770 |
| PS101s21 | TGTAAAACGACGGCCAGTCCAATCCTTCCTGATACCACA | 702 | CAGGAAACAGCTATGACCGGGAACCTTCATTCAGAGACC | 771 |
| PS101s22 | TGTAAAACGACGGCCAGTACTAGCCCTCAGTGCCTTCTC | 703 | CAGGAAACAGCTATGACCTCCAATCTTGAGGGGAAATCT | 772 |
| PS101s23 | TGTAAAACGACGGCCAGTCTTGGTGGAGAGTATCGCAA | 704 | CAGGAAACAGCTATGACCGGAGCACATCCTTCCATTGTA | 773 |
| PS101s24 | TGTAAAACGACGGCCAGTGGTCCCAACTCTCTCCATAGG | 705 | CAGGAAACAGCTATGACCTGGGTAGAGTTGGAGGAAGGT | 774 |
| PS101s25 | TGTAAAACGACGGCCAGTAGTTCTGCTGGGAGCTCTTCT | 706 | CAGGAAACAGCTATGACCAGCTGTCTTCCCCTTCTCTTG | 775 |
| PS101s26 | TGTAAAACGACGGCCAGTCTAATCGTCATGGGGGTTCTT | 707 | CAGGAAACAGCTATGACCCACCATCATCGTCAUCCTCT | 776 |
| PS101s27 | TGTAAAACGACGGCCAGTCTAATCGTCATGGGGGTTCTT | 708 | CAGGAAACAGCTATGACCCACCATCATCGTCATTCCTCT | 777 |
| PS101s28 | TGTAAAACGACGGCCAGTCTAATCGTCATGGGGGTTCTT | 709 | CAGGMACAGCTATGACCCACCATCATCGTCATTCCTCT | 778 |
| PS101s29 | TGTAAAACGACGGCCAGTGAAATTGGAAAGTGCCACAGA | 710 | CAGGAAACAGCTATGACCAGTGTGGTCCATGGAGATGAG | 779 |
| PS101s30 | TGTAAAACGACGGCCAGTGCCCAGGCATAGAGTTTCAAT | 711 | CAGGAAACAGCTATGACCAGCATGCACTTTCTTCCTCAA | 780 |
| PS101s31 | TGTAAAACGACGGCCAGTGTTGTGCCACTGGTGTTTCTT | 712 | CAGGMACAGCTATGACCGGACAAGATAGMCTTGGGCC | 781 |
| PS101s32 | TGTAAAACGACGGCCAGTACTTGTGCCCAGGACATAATG | 713 | CAGGAAACAGCTATGACCCTCCTTGTGGTTGGCATTCTA | 782 |
| PS101s33 | TGTAAAACGACGGCCAGTTCCCTCAATCTCCAGGATTCT | 714 | CAGGAAACAGCTATGACCATTTCTGGAGTGCCTTTGGTT | 783 |

What is claimed is:

1.) An isolated nucleic acid derived from a human gene encoding a protein selected from a member of the group consisting of the human OATP2 protein, and human cMOAT protein, wherein said nucleic acid comprises at least one polymorphic position.

2.) The isolated nucleic acid of claim 1 wherein said at least one polymorphic position for each said gene is a polymorphic position specified in Table IV, V, or complement thereof.

3.) The isolated nucleic acid of claim 2 wherein the sequence at said at least one polymorphic position is depicted in a nucleic acid sequence selected from the group consisting of SEQ ID NO: 5, 7, 9, 11, 13, 15, 17, 19, 21,23, 25, 27, 29, 31,33, 35,37, 39,41,43,45,47,49, 603, 51 to 326, or complement thereof.

4.) The isolated nucleic acid of claim 3 wherein said at least one polymorphic position resides in a member of the group consisting of: a non-coding position within the genomic sequence of said gene; a coding position within the genomic sequence of said gene; a coding position which results in a missense mutation of the translated product of said gene; a coding position that results in a silent mutation of the translated product of said gene; a non-coding position that resides within the untranslated region of said gene; and a non-coding position that resides within an intronic region of said gene.

5.) The isolated nucleic acid molecule according to claim 4, wherein said nucleic acid sequence is at least 15 nucleotides in length.

6.) The isolated nucleic acid molecule according to claim 4, wherein said nucleic acid sequence is at least 30 nucleotides in length.

7.) The isolated nucleic acid molecule according to claim 4, wherein said nucleic acid sequence is at least 40 nucleotides in length.

8.) A probe that hybridizes to a polymorphic position defined in claim 2.

9.) The probe of claim 8 wherein said probe is at least 15 nucleotides in length.

10.) The probe of claim 9 wherein a central position of the probe aligns with said polymorphic position.

11.) The probe of claim 9 wherein the 3′ end of the primer aligns with said polymorphic position.

12.) A method of analyzing at least one nucleic acid sample, comprising the steps of (1) obtaining a nucleic acid sample from one or more individuals; and (2) determining the nucleic acid sequence at one or more polymorphic positions in a gene encoding a protein selected from the group consisting of the human OATP2 protein, and human cMOAT protein, wherein the presence of a reference allele at said position(s) correlates to a phenotype.

13.) A method of identifying at least one nucleic acid sample that correlates to a phenotype, comprising the steps of (1) obtaining said nucleic acid sample from one or more individuals; and (2) determining the nucleic acid sequence at one or more polymorphic positions in a gene encoding a protein selected from the group consisting of the human OATP2 protein, and human cMOAT protein, wherein the presence of a alternate allele at said position(s) correlates to said phenotype.

14.) The method according to claim 12, wherein the phenotype is selected from the group consisting of: low hepatic statin uptake, decreased statin response; increased risk of developing drug interactions upon administration of at least one statin; increased susceptibility for developing a cardiovascular disorder; increased susceptibility for developing high cholesterol levels, metabolic dieases, inflammatory diseases, hypertension, and congestive heart failure; increased susceptibility for having low efficious response to pravastatin therapy; increased susceptibility for having decreased ability to transport compounds by organic anion transporters; increased susceptibility for having decreased ability to transport compounds by organic anion transporters in the liver; increased susceptibility for developing liver disease; increased susceptibility for developing a disease associated with low levels of low-density lipoprotein cholesterol; increased susceptibility to develop multidrug resistance; increased susceptibility to to have decreased response to HMG-CoA reductase inhibitor therapy; increased susceptibility for developing a disorder due to decreased hepatic or cellular uptake of taurocholate, estrone sulfate, estradiol 17-D-glucuronide, leukotriene C4, prostaglandin E2, or thyroid hormone.

15.) The method according to claim 13, wherein the phenotype is selected from the group consisting of: low hepatic statin uptake, decreased statin response; increased risk of developing drug interactions upon administration of at least one statin; increased susceptibility for developing a cardiovascular disorder; increased susceptibility for developing high cholesterol levels, metabolic dieases, inflammatory diseases, hypertension, and congestive heart failure; increased susceptibility for having low efficious response to pravastatin therapy; increased susceptibility for having decreased ability to transport compounds by organic anion transporters; increased susceptibility for having decreased ability to transport compounds by organic anion transporters in the liver; increased susceptibility for developing liver disease; increased susceptibility for developing a disease associated with low levels of low-density lipoprotein cholesterol; increased susceptibility to develop multidrug resistance; increased susceptibility to to have decreased response to HMG-CoA reductase inhibitor therapy; increased susceptibility for developing a disorder due to decreased hepatic or cellular uptake of taurocholate, estrone sulfate, estradiol 1 7-D-glucuronide, leukotriene C4, prostaglandin E2, or thyroid hormone.

16.) A kit for identifying an individual at risk of developing a phenotype, said kit comprising
i.) sequencing primers, and
ii.) sequencing reagents,
wherein said primers are primers that hybridize to at least one polymorphic position in a human gene selected from the group consisting of human OATP2 protein, and human cMOAT protein.

17.) The kit according to claim 16 wherein said polymorphic positions are selected from a group consisting of the polymorphic positions provided in Table IV, or V.

18.) The kit according to claim 17 wherein the sequence at said at least one polymorphic position is depicted in a nucleic acid sequence selected from the group consisting of SEQ ID NO: 5, 7, 9, 11, 13, 15, 17, 19, 21, 23, 25, 27, 29, 31, 33, 35, 37, 39, 41, 43, 45, 47, 49, 603, 51 to 326, or complement thereof.

19.) The kit according to claim 17 wherein the wherein the phenotype is selected from the group consisting of: low hepatic statin uptake, decreased statin response; increased risk of developing drug interactions upon administration of at least one statin; increased susceptibility for developing a cardiovascular disorder; increased susceptibility for developing high cholesterol levels, metabolic dieases, inflammatory diseases, hypertension, and congestive heart failure; increased susceptibility for having low efficious response to pravastatin therapy; increased susceptibility for having decreased ability to transport compounds by organic anion transporters; increased susceptibility for having decreased ability to transport compounds by organic anion transporters in the liver; increased susceptibility for developing liver disease; increased susceptibility for developing a disease associated with low levels of low-density lipoprotein cholesterol; increased susceptibility to develop multidrug resistance; increased susceptibility to to have decreased response to HMG-CoA reductase inhibitor therapy; increased susceptibility for developing a disorder due to decreased hepatic or cellular uptake of taurocholate, estrone sulfate, estradiol 17-D-glucuronide, leukotriene C4, prostaglandin E2, or thyroid hormone.

The application's sequence listing, which the Patent Office published only in electronic form, follows.

SEQUENCE LISTING (783 sequences)

SEQ ID NO: 1 - DNA, 2830 bp, Homo sapiens
  CDS (135)..(2210)
cggacgcgtgggcggacgcgtgggtcgcccacgcgtccgacttgttgcagttgctgtaggattctaaatccaggtgattgtttcaaactgagcatcaacaacaaaaacatttgtatgatatctatatttcaatcatggaccaaaatcaacatttgaataaaacagcagaggcacaaccttcagagaataagaaaacaagatactgcaatggattgaagatgttcttggcagctctgtcactcagctttattgctaagacactaggtgcaattattatgaaaagttccatcattcatatagaacggagatttgagatatcctcttctcttgttggttttattgacggaagctttgaaattggaaatttgcttgtgattgtatttgtgagttactttggatccaaactacatagaccaaagttaattggaatcggttgtttcattatgggaattggaggtgttttgactgctttgccacatttcttcatgggatattacaggtattctaaagaaactaatatcgattcatcagaaaattcaacatcgaccttatccacttgtttaattaatcaaattttatcactcaatagagcatcacctgagatagtgggaaaaggttgtttaaaggaatctgggtcatacatgtggatatatgtgttcatgggtaatatgcttcgtggaataggggagactcccatagtaccattggggctttcttacattgatgatttcgctaaagaaggacattcttctttgtatttaggtatattgaatgcaatagcaatgattggtccaatcattggctttaccctgggatctctgttttctaaaatgtacgtggatattggatatgtagatctaagcactatcaggataactcctactgattctcgatgggttggagcttggtggcttaatttccttgtgtctggactattctccattatttcttccataccattctttttcttgccccaaactccaaataaaccacaaaaagaaagaaaagcttcactgtctttgcatgtgctggaaacaaatgatgaaaaggatcaaacagctaatttgaccaatcaaggaaaaaatattaccaaaaatgtgactggttttttccagtcttttaaaagcatccttactaatcccctgtatgttatgtttgtgcttttgacgttgttacaagtaagcagctatattggtgcttttacttatgtcttcaaatacgtagagcaacagtatggtcagccttcatctaaggctaacatcttattgggagtcataaccatacctatttttgcaagtggaatgtttttaggaggatatatcattaaaaaattcaaactgaacaccgttggaattgccaaattctcatgttttactgctgtgatgtcattgtccttttacctattatattttttcatactctgtgaaaacaaatcagttgccggactaaccatgacctatgatggaaataatccagtgacatctcatagagatgtaccactttcttattgcaactcagactgcaattgtgatgaaagtcaatgggaaccagtctgtggaaacaatggaataacttacatctcaccctgtctagcaggttgcaaatcttcaagtggcaataaaaagcctatagtgttttacaactgcagttgtttggaagtaactggtctccagaacagaaattactcagcccatttgggtgaatgcccaagagatgatgcttgtacaaggaaattttacttttttgttgcaatacaagtcttgaatttatttttctctgcacttggaggcacctcacatgtcatgctgattgttaaaattgttcaacctgaattgaaatcacttgcactgggtttccactcaatggttatacgagcactaggaggaattctagctccaatatattttggggctctgattgatacaacgtgtataaagtggtccaccaacaactgtggcacacgtgggtcatgtaggacatataattccacatcattttcaagggtctacttgggcttgtcttcaatgttaagagtctcatcacttgttttatatattatattaatttatgccatgaagaaaaaatatcaagagaaagatatcaatgcatcagaaaatggaagtgtcatggatgaagcaaacttagaatccttaaataaaaataaacattttgtcccttctgctggggcagatagtgaaacacattgttaaggggagaaaaaaagccacttctgcttctgtgtttccaaacagcattgcattgattcagtaagatgttatttttgaggagttcctggtcctttcactaagaatttccacatcttttatggtggaagtataaataagcctatgaacttataataaaacaaactgtaggtagaaaaaatgagagtactcattgttacattatagctacatatttgtggttaaggttagactatatgatccatacaaattaaagtgagagacatggttactgtgtaataaaagaaaaaatacttgttcaggtaattctaattcttaataaaacaaatgagtatcatacaggtagaggttaaaaaggaggagctagattcatatcctaagtaaagagaaatgcctagtgtctattttattaaacaaacaaacacagagtttgaactataatactaaggcctgaagtctagcttggatatatgctacaataatatctgttactcacataaaattatatatttcacagactttatcaatgtataattaacaattatcttgtttaagtaaatttagaatacatttaagtattgtggaagaaataaagacattccaatatttgcaaaaaaaaaaaaaaa

SEQ ID NO: 2 - protein, 691 aa, Homo sapiens
MDQNQHLNKTAEAQPSENKKTRYCNGLKMFLAALSLSFIAKTLGAIIMKSSIIHIERRFEISSSLVGFIDGSFEIGNLLVIVFVSYFGSKLHRPKLIGIGCFIMGIGGVLTALPHFFMGYYRYSKETNIDSSENSTSTLSTCLINQILSLNRASPEIVGKGCLKESGSYMWIYVFMGNMLRGIGETPIVPLGLSYIDDFAKEGHSSLYLGILNAIAMIGPIIGFTLGSLFSKMYVDIGYVDLSTIRITPTDSRWVGAWWLNFLVSGLFSIISSIPFFFLPQTPNKPQKERKASLSLHVLETNDEKDQTANLTNQGKNITKNVTGFFQSFKSILTNPLYVMFVLLTLLQVSSYIGAFTYVFKYVEQQYGQPSSKANILLGVITIPIFASGMFLGGYIIKKFKLNTVGIAKFSCFTAVMSLSFYLLYFFILCENKSVAGLTMTYDGNNPVTSHRDVPLSYCNSDCNCDESQWEPVCGNNGITYISPCLAGCKSSSGNKKPIVFYNCSCLEVTGLQNRNYSAHLGECPRDDACTRKFYFFVAIQVLNLFFSALGGTSHVMLIVKIVQPELKSLALGFHSMVIRALGGILAPIYFGALIDTTCIKWSTNNCGTRGSCRTYNSTSFSRVYLGLSSMLRVSSLVLYIILIYAMKKKYQEKDINASENGSVMDEANLESLNKNKHFVPSAGADSETHC

SEQ ID NO: 3 - DNA, 5300 bp, Homo sapiens
  CDS (102)..(4739)
aggataattcctgttccactttctttgatgaaacaagtaaagaagaaacaacacaatcatattaatagaagagtcttcgttccagacgcagtccaggaatcatgctggagaagttctgcaactctactttttggaattcctcattcctggacagtccggaggcagacctgccactttgttttgagcaaactgttctggtgtggattcccttgggcttcctatggctcctggccccctggcagcttctccacgtgtataaatccaggaccaagagatcctctaccaccaaactctatcttgctaagcaggtattcgttggttttcttcttattctagcagccatagagctggcccttgtactcacagaagactctggacaagccacagtccctgctgttcgatataccaatccaagcctctacctaggcacatggctcctggttttgctgatccaatacagcagacaatggtgtgtacagaaaaactcctggttcctgtccctattctggattctctcgatactctgtggcactttccaatttcagactctgatccggacactcttacagggtgacaattctaatctagcctactcctgcctgttcttcatctcctacggattccagatcctgatcctgatcttttcagcattttcagaaaataatgagtcatcaaataatccatcatccatagcttcattcctgagtagcattacctacagctggtatgacagcatcattctgaaaggctacaagcgtcctctgacactcgaggatgtctgggaagttgatgaagagatgaaaaccaagacattagtgagcaagtttgaaacgcacatgaagagagagctgcagaaagccaggcgggcactccagagacggcaggagaagagctcccagcagaactctggagccaggctgcctggcttgaacaagaatcagagtcaaagccaagatgcccttgtcctggaagatgttgaaaagaaaaaaaagaagtctgggaccaaaaaagatgttccaaaatcctggttgatgaaggctctgttcaaaactttctacatggtgctcctgaaatcattcctactgaagctagtgaatgacatcttcacgtttgtgagtcctcagctgctgaaattgctgatctcctttgcaagtgaccgtgacacatatttgtggattggatatctctgtgcaatcctcttattcactgcggctctcattcagtctttctgccttcagtgttatttccaactgtgcttcaagctgggtgtaaaagtacggacagctatcatggcttctgtatataagaaggcattgaccctatccaacttggccaggaaggagtacaccgttggagaaacagtgaacctgatgtctgtggatgcccagaagctcatggatgtgaccaacttcatgcacatgctgtggtcaagtgttctacagattgtcttatctatcttcttcctatggagagagttgggaccctcagtcttagcaggtgttggggtgatggtgcttgtaatcccaattaatgcgatactgtccaccaagagtaagaccattcaggtcaaaaatatgaagaataaagacaaacgtttaaagatcatgaatgagattcttagtggaatcaagatcctgaaatattttgcctgggaaccttcattcagagaccaagtacaaaacctccggaagaaagagctcaagaacctgctggcctttagtcaactacagtgtgtagtaatattcgtcttccagttaactccagtcctggtatctgtggtcacattttctgtttatgtcctggtggatagcaacaatattttggatgcacaaaaggccttcacctccattaccctcttcaatatcctgcgctttcccctgagcatgcttcccatgatgatctcctccatgctccaggccagtgtttccacagagcggctagagaagtacttgggaggggatgacttggacacatctgccattcgacatgactgcaattttgacaaagccatgcagttttctgaggcctcctttacctgggaacatgattcggaagccacagtccgagatgtgaacctggacattatggcaggccaacttgtggctgtgataggccctgtcggctctgggaaatcctccttgatatcagccatgctgggagaaatggaaaatgtccacgggcacatcaccatcaagggcaccactgcctatgtcccacagcagtcctggattcagaatggcaccataaaggacaacatcctttttggaacagagtttaatgaaaagaggtaccagcaagtactggaggcctgtgctctcctcccagacttggaaatgctgcctggaggagatttggctgagattggagagaagggtataaatcttagtgggggtcagaagcagcggatcagcctggccagagctacctaccaaaatttagacatctatcttctagatgaccccctgtctgcagtggatgctcatgtaggaaaacatatttttaataaggtcttgggccccaatggcctgttgaaaggcaagactcgactcttggttacacatagcatgcactttcttcctcaagtggatgagattgtagttctggggaatggaacaattgtagagaaaggatcctacagtgctctcctggccaaaaaaggagagtttgctaagaatctgaagacatttctaagacatacaggccctgaagaggaagccacagtccatgatggcagtgaagaagaagacgatgactatgggctgatatccagtgtggaagagatccccgaagatgcagcctccataaccatgagaagagagaacagctttcgtcgaacacttagccgcagttctaggtccaatggcaggcatctgaagtccctgagaaactccttgaaaactcggaatgtgaatagcctgaaggaagacgaagaactagtgaaaggacaaaaactaattaagaaggaattcatagaaactggaaaggtgaagttctccatctacctggagtacctacaagcaataggattgttttcgatattcttcatcatccttgcgtttgtgatgaattctgtggcttttattggatccaacctctggctcagtgcttggaccagtgactctaaaatcttcaatagcaccgactatccagcatctcagagggacatgagagttggagtctacggagctctgggattagcccaaggtatatttgtgttcatagcacatttctggagtgcctttggtttcgtccatgcatcaaatatcttgcacaagcaactgctgaacaatatccttcgagcacctatgagattttttgacacaacacccacaggccggattgtgaacaggtttgccggcgatatttccacagtggatgacaccctgcctcagtccttgcgcagctggattacatgcttcctggggataatcagcacccttgtcatgatctgcatggccactcctgtcttcaccatcatcgtcattcctcttggcattatttatgtatctgttcagatgttttatgtgtctacctcccgccagctgaggcgtctggactctgtcaccaggtccccaatctactctcacttcagcgagaccgtatcaggtttgccagttatccgtgcctttgagcaccagcagcgatttctgaaacacaatgaggagaggattgacaccaaccagaaatgtgtcttttcctggatcacctccaacaggtggcttgcaattcgcctggagctggttgggaacctgactgtcttcttttcagccttgatgatggttatttatagagataccctaagtggggacactgttggctttgttctgtccaatgcactcaatatcacacaaaccctgaactggctggtgaggatgacatcagaaatagagaccaacattgtggctgttgagcgaataactgagtacacaaaagtggaaaatgaggcaccctgggtgactgataagaggcctccgccagattggcccagcaaaggcaagatccagtttaacaactaccaagtgcggtaccgacctgagctggatctggtcctcagagggatcacttgtgacatcggtagcatggagaagattggtgtggtgggcaggacaggagctggaaagtcatccctcacaaactgcctcttcagaatcttagaggctgccggtggtcagattatcattgatggagtagatattgcttccattgggctccacgacctccgagagaagctgaccatcatcccccaggaccccatcctgttctctggaagcctgaggatgaatctcgaccctttcaacaactactcagatgaggagatttggaaggccttggagctggctcacctcaagtcttttgtggccagcctgcaacttgggttatcccacgaagttacagaggctggtggcaacctgagcataggccagaggcagctgctgtgcctgggcagggctctgcttcggaaatccaagatcctggtcctggatgaggccactgctgcggtggatctagagacagacaacctcattcagacgaccatccaaaacgagttcgcccactgcacagtgatcaccatcgcccacaggctgcataccatcatggacagtgacaaggtaatggtcctagacaacgggaagattatagagtacggcagccctgaagaactgctacaaatccctggacccttttactttatggctaaggaagctggcattgagaatgtgaacagcacaaaattctagcagaaggccccatgggttagaaaaggactataagaataatttcttatttaattttattttttataaaatacagaatacatacaaaagtgtgtataaaatgtacgttttaaaaaaggataagtgaacacccatgaacctactacccaggttaagaaaataaatgtcaccaggtacttgagaaacccctcgattgtctacctcgatcgtacttccttgctacccacccctcccagggacaaccactgtcctgaatttcacgataattattcctttgcctttcatttctgttttatcacctttgtatgtatctttaaacaacatatacccttttttacttatgtaaatggactgactcatactgcatacatcttctatgacttgattcttttgttcaatattatatctgagattcatccatggtgatgcaaataggtgcattattttttttcactgctctgtagtctggcattgtatgaatacagcacaatgtatcagttttaatattggggatcattagcattattctcaggtttttaaaaattataagcagtactactatgg

SEQ ID NO: 4 - protein, 1545 aa, Homo sapiens [sequence omitted]

SEQ ID NO: 5 - DNA, 2830 bp, Homo sapiens
  CDS (135)..(2210)
cggacgcgtgggcggacgcgtgggtcgcccacgcgtccgacttgttgcagttgctgtaggattctaaatccaggtgattgtttcaaactgagcatcaacaacaaaaacatttgtatgatatctatatttcaatcatggaccaaaatcaacatttgaataaaacagcagaggcacaaccttcagagaataagaaaacaagatactgcaatggattgaagatgttcttggcagctctgtcactcagctttattgctaagacactaggtgcaattattatgaaaagttccatcattcatatagaacggagatttgagatatcctcttctcttgttggttttattgacggaagctttgaaattggaaatttgcttgtgattgtatttgtgagttactttggatccaaactacatagaccaaagttaattggaatcggttgtttcattatgggaattggaggtgttttgactgctttgccacatttcttcatgggatattacaggtattctaaagaaactaatatcgattcatcagaaaattcaacatcaaccttatccacttgtttaattaatcaaattttatcactcaatagagcatcacctgagatagtgggaaaaggttgtttaaaggaatctgggtcatacatgtggatatatgtgttcatgggtaatatgcttcgtggaataggggagactcccatagtaccattggggctttcttacattgatgatttcgctaaagaaggacattcttctttgtatttaggtatattgaatgcaatagcaatgattggtccaatcattggctttaccctgggatctctgttttctaaaatgtacgtggatattggatatgtagatctaagcactatcaggataactcctactgattctcgatgggttggagcttggtggcttaatttccttgtgtctggactattctccattatttcttccataccattctttttcttgccccaaactccaaataaaccacaaaaagaaagaaaagcttcactgtctttgcatgtgctggaaacaaatgatgaaaaggatcaaacagctaatttgaccaatcaaggaaaaaatattaccaaaaatgtgactggttttttccagtcttttaaaagcatccttactaatcccctgtatgttatgtttgtgcttttgacgttgttacaagtaagcagctatattggtgcttttacttatgtcttcaaatacgtagagcaacagtatggtcagccttcatctaaggctaacatcttattgggagtcataaccatacctatttttgcaagtggaatgtttttaggaggatatatcattaaaaaattcaaactgaacaccgttggaattgccaaattctcatgttttactgctgtgatgtcattgtccttttacctattatattttttcatactctgtgaaaacaaatcagttgccggactaaccatgacctatgatggaaataatccagtgacatctcatagagatgtaccactttcttattgcaactcagactgcaattgtgatgaaagtcaatgggaaccagtctgtggaaacaatggaataacttacatctcaccctgtctagcaggttgcaaatcttcaagtggcaataaaaagcctatagtgttttacaactgcagttgtttggaagtaactggtctccagaacagaaattactcagcccatttgggtgaatgcccaagagatgatgcttgtacaaggaaattttacttttttgttgcaatacaagtcttgaatttatttttctctgcacttggaggcacctcacatgtcatgctgattgttaaaattgttcaacctgaattgaaatcacttgcactgggtttccactcaatggttatacgagcactaggaggaattctagctccaatatattttggggctctgattgatacaacgtgtataaagtggtccaccaacaactgtggcacacgtgggtcatgtaggacatataattccacatcattttcaagggtctacttgggcttgtcttcaatgttaagagtctcatcacttgttttatatattatattaatttatgccatgaagaaaaaatatcaagagaaagatatcaatgcatcagaaaatggaagtgtcatggatgaagcaaacttagaatccttaaataaaaataaacattttgtcccttctgctggggcagatagtgaaacacattgttaaggggagaaaaaaagccacttctgcttctgtgtttccaaacagcattgcattgattcagtaagatgttatttttgaggagttcctggtcctttcactaagaatttccacatcttttatggtggaagtataaataagcctatgaacttataataaaacaaactgtaggtagaaaaaatgagagtactcattgttacattatagctacatatttgtggttaaggttagactatatgatccatacaaattaaagtgagagacatggttactgtgtaataaaagaaaaaatacttgttcaggtaattctaattcttaataaaacaaatgagtatcatacaggtagaggttaaaaaggaggagctagattcatatcctaagtaaagagaaatgcctagtgtctattttattaaacaaacaaacacagagtttgaactataatactaaggcctgaagtctagcttggatatatgctacaataatatctgttactcacataaaattatatatttcacagactttatcaatgtataattaacaattatcttgtttaagtaaatttagaatacatttaagtattgtggaagaaataaagacattccaatatttgcaaaaaaaaaaaaaaa

SEQ ID NO: 6 - protein, 691 aa, Homo sapiens; identical to SEQ ID NO: 2

SEQ ID NO: 7 - DNA, 2830 bp, Homo sapiens
  CDS (135)..(2210)
cggacgcgtgggcggacgcgtgggtcgcccacgcgtccgacttgttgcagttgctgtaggattctaaatccaggtgattgtttcaaactgagcatcaacaacaaaaacatttgtatgatatctatatttcaatcatggaccaaaatcaacatttgaataaaacagcagaggcacaaccttcagagaataagaaaacaagatactgcaatggattgaagatgttcttggcagctctgtcactcagctttattgctaagacactaggtgcaattattatgaaaagttccatcattcatatagaacggagatttgagatatcctcttctcttgttggttttattgacggaagctttgaaattggaaatttgcttgtgattgtatttgtgagttactttggatccaaactacatagaccaaagttaattggaatcggttgtttcattatgggaattggaggtgttttgactgctttgccacatttcttcatgggatattacaggtattctaaagaaactaatatcgattcatcagaaaattcaacatcgaccttatccacttgtttaattaatcaaattttatcactcaatagagcatcaactgagatagtgggaaaaggttgtttaaaggaatctgggtcatacatgtggatatatgtgttcatgggtaatatgcttcgtggaataggggagactcccatagtaccattggggctttcttacattgatgatttcgctaaagaaggacattcttctttgtatttaggtatattgaatgcaatagcaatgattggtccaatcattggctttaccctgggatctctgttttctaaaatgtacgtggatattggatatgtagatctaagcactatcaggataactcctactgattctcgatgggttggagcttggtggcttaatttccttgtgtctggactattctccattatttcttccataccattctttttcttgccccaaactccaaataaaccacaaaaagaaagaaaagcttcactgtctttgcatgtgctggaaacaaatgatgaaaaggatcaaacagctaatttgaccaatcaaggaaaaaatattaccaaaaatgtgactggttttttccagtcttttaaaagcatccttactaatcccctgtatgttatgtttgtgcttttgacgttgttacaagtaagcagctatattggtgcttttacttatgtcttcaaatacgtagagcaacagtatggtcagccttcatctaaggctaacatcttattgggagtcataaccatacctatttttgcaagtggaatgtttttaggaggatatatcattaaaaaattcaaactgaacaccgttggaattgccaaattctcatgttttactgctgtgatgtcattgtccttttacctattatattttttcatactctgtgaaaacaaatcagttgccggactaaccatgacctatgatggaaataatccagtgacatctcatagagatgtaccactttcttattgcaactcagactgcaattgtgatgaaagtcaatgggaaccagtctgtggaaacaatggaataacttacatctcaccctgtctagcaggttgcaaatcttcaagtggcaataaaaagcctatagtgttttacaactgcagttgtttggaagtaactggtctccagaacagaaattactcagcccatttgggtgaatgcccaagagatgatgcttgtacaaggaaattttacttttttgttgcaatacaagtcttgaatttatttttctctgcacttggaggcacctcacatgtcatgctgattgttaaaattgttcaacctgaattgaaatcacttgcactgggtttccactcaatggttatacgagcactaggaggaattctagctccaatatattttggggctctgattgatacaacgtgtataaagtggtccaccaacaactgtggcacacgtgggtcatgtaggacatataattccacatcattttcaagggtctacttgggcttgtcttcaatgttaagagtctcatcacttgttttatatattatattaatttatgccatgaagaaaaaatatcaagagaaagatatcaatgcatcagaaaatggaagtgtcatggatgaagcaaacttagaatccttaaataaaaataaacattttgtcccttctgctggggcagatagtgaaacacattgttaaggggagaaaaaaagccacttctgcttctgtgtttccaaacagcattgcattgattcagtaagatgttatttttgaggagttcctggtcctttcactaagaatttccacatcttttatggtggaagtataaataagcctatgaacttataataaaacaaactgtaggtagaaaaaatgagagtactcattgttacattatagctacatatttgtggttaaggttagactatatgatccatacaaattaaagtgagagacatggttactgtgtaataaaagaaaaaatacttgttcaggtaattctaattcttaataaaacaaatgagtatcatacaggtagaggttaaaaaggaggagctagattcatatcctaagtaaagagaaatgcctagtgtctattttattaaacaaacaaacacagagtttgaactataatactaaggcctgaagtctagcttggatatatgctacaataatatctgttactcacataaaattatatatttcacagactttatcaatgtataattaacaattatcttgtttaagtaaatttagaatacatttaagtattgtggaagaaataaagacattccaatatttgcaaaaaaaaaaaaaaa

SEQ ID NO: 8 - protein, 691 aa, Homo sapiens
MDQNQHLNKTAEAQPSENKKTRYCNGLKMFLAALSLSFIAKTLGAIIMKSSIIHIERRFEISSSLVGFIDGSFEIGNLLVIVFVSYFGSKLHRPKLIGIGCFIMGIGGVLTALPHFFMGYYRYSKETNIDSSENSTSTLSTCLINQILSLNRASTEIVGKGCLKESGSYMWIYVFMGNMLRGIGETPIVPLGLSYIDDFAKEGHSSLYLGILNAIAMIGPIIGFTLGSLFSKMYVDIGYVDLSTIRITPTDSRWVGAWWLNFLVSGLFSIISSIPFFFLPQTPNKPQKERKASLSLHVLETNDEKDQTANLTNQGKNITKNVTGFFQSFKSILTNPLYVMFVLLTLLQVSSYIGAFTYVFKYVEQQYGQPSSKANILLGVITIPIFASGMFLGGYIIKKFKLNTVGIAKFSCFTAVMSLSFYLLYFFILCENKSVAGLTMTYDGNNPVTSHRDVPLSYCNSDCNCDESQWEPVCGNNGITYISPCLAGCKSSSGNKKPIVFYNCSCLEVTGLQNRNYSAHLGECPRDDACTRKFYFFVAIQVLNLFFSALGGTSHVMLIVKIVQPELKSLALGFHSMVIRALGGILAPIYFGALIDTTCIKWSTNNCGTRGSCRTYNSTSFSRVYLGLSSMLRVSSLVLYIILIYAMKKKYQEKDINASENGSVMDEANLESLNKNKHFVPSAGADSETHC

SEQ ID NO: 9 - DNA, 2830 bp, Homo sapiens; identical to SEQ ID NO: 1
  CDS (135)..(2210)

SEQ ID NO: 10 - protein, 691 aa, Homo sapiens; identical to SEQ ID NO: 2

SEQ ID NO: 11 - DNA, 2830 bp, Homo sapiens
  CDS (135)..(2210)
cggacgcgtgggcggacgcgtgggtcgcccacgcgtccgacttgttgcagttgctgtaggattctaaatccaggtgattgtttcaaactgagcatcaacaacaaaaacatttgtatgatatctatatttcaatcatggaccaaaatcaacatttgaataaaacagcagaggcacaaccttcagagaataagaaaacaagatactgcaatggattgaagatgttcttggcagctctgtcactcagctttattgctaagacactaggtgcaattattatgaaaagttccatcattcatatagaacggagatttgagatatcctcttctcttgttggttttattgacggaagctttgaaattggaaatttgcttgtgattgtatttgtgagttactttggatccaaactacatagaccaaagttaattggaatcggttgtttcattatgggaattggaggtgttttgactgctttgccacatttcttcatgggatattacaggtattctaaagaaactaatatcgattcatcagaaaattcaacatcgaccttatccacttgtttaattaatcaaattttatcactcaatagagcatcacctgagatagtgggaaaaggttgtttaaaggaatctgggtcatacatgtggatatatgtgttcatgggtaatatgcttcgtggaataggggagactcccatagtaccattggggctttcttacattgatgatttcgctaaagaaggacattcttctttgtatttaggtatattgaatgcaatagcaatgattggtccaatcattggctttaccctgggatctctgttttctaaaatgtacgtggatattggatatgtagatctaagcactatcaggataactcctactgattctcgatgggttggagcttggtggcttaatttccttgtgtctggactattctccattatttcttccataccattctttttcttgccccaaactccaaataaaccacaaaaagaaagaaaagcttcactgtctttgcatgtgctggaaacaaatgatgaaaaggatcaaacagctaatttgaccaatcaaggaaaaaatattaccaaaaatgtgactggttttttccagtcttttaaaagcatccttactaatcccctgtatgttatgtttgtgcttttgacgttgttacaagtaagcagctatattggtgcttttacttatgtcttcaaatacgtagagcaacagtatggtcagccttcatctaaggctaacatcttattgggagtcataaccatacctatttttgcaagtggaatgtttttaggaggatatatcattaaaaaattcaaactgaacaccgttggaattgccaaattctcatgttttactgctgtgatgtcattgtccttttacctattatattttttcatactctgtgaaaacaaatcagttgccggactaaccatgacctatgatggaaataatccagtgacatctcatagagatgtaccactttcttattgcaactcagactgcaattgtgatgaaagtcaatgggaaccagtctgtggaaacaatggaataacttacatctcaccctgtctagcagcttgcaaatcttcaagtggcaataaaaagcctatagtgttttacaactgcagttgtttggaagtaactggtctccagaacagaaattactcagcccatttgggtgaatgcccaagagatgatgcttgtacaaggaaattttacttttttgttgcaatacaagtcttgaatttatttttctctgcacttggaggcacctcacatgtcatgctgattgttaaaattgttcaacctgaattgaaatcacttgcactgggtttccactcaatggttatacgagcactaggaggaattctagctccaatatattttggggctctgattgatacaacgtgtataaagtggtccaccaacaactgtggcacacgtgggtcatgtaggacatataattccacatcattttcaagggtctacttgggcttgtcttcaatgttaagagtctcatcacttgttttatatattatattaatttatgccatgaagaaaaaatatcaagagaaagatatcaatgcatcagaaaatggaagtgtcatggatgaagcaaacttagaatccttaaataaaaataaacattttgtcccttctgctggggcagatagtgaaacacattgttaaggggagaaaaaaagccacttctgcttctgtgtttccaaacagcattgcattgattcagtaagatgttatttttgaggagttcctggtcctttcactaagaatttccacatcttttatggtggaagtataaataagcctatgaacttataataaaacaaactgtaggtagaaaaaatgagagtactcattgttacattatagctacatatttgtggttaaggttagactatatgatccatacaaattaaagtgagagacatggttactgtgtaataaaagaaaaaatacttgttcaggtaattctaattcttaataaaacaaatgagtatcatacaggtagaggttaaaaaggaggagctagattcatatcctaagtaaagagaaatgcctagtgtctattttattaaacaaacaaacacagagtttgaactataatactaaggcctgaagtctagcttggatatatgctacaataatatctgttactcacataaaattatatatttcacagactttatcaatgtataattaacaattatcttgtttaagtaaatttagaatacatttaagtattgtggaagaaataaagacattccaatatttgcaaaaaaaaaaaaaaa

SEQ ID NO: 12 - protein, 691 aa, Homo sapiens
MDQNQHLNKTAEAQPSENKKTRYCNGLKMFLAALSLSFIAKTLGAIIMKSSIIHIERRFEISSSLVGFIDGSFEIGNLLVIVFVSYFGSKLHRPKLIGIGCFIMGIGGVLTALPHFFMGYYRYSKETNIDSSENSTSTLSTCLINQILSLNRASPEIVGKGCLKESGSYMWIYVFMGNMLRGIGETPIVPLGLSYIDDFAKEGHSSLYLGILNAIAMIGPIIGFTLGSLFSKMYVDIGYVDLSTIRITPTDSRWVGAWWLNFLVSGLFSIISSIPFFFLPQTPNKPQKERKASLSLHVLETNDEKDQTANLTNQGKNITKNVTGFFQSFKSILTNPLYVMFVLLTLLQVSSYIGAFTYVFKYVEQQYGQPSSKANILLGVITIPIFASGMFLGGYIIKKFKLNTVGIAKFSCFTAVMSLSFYLLYFFILCENKSVAGLTMTYDGNNPVTSHRDVPLSYCNSDCNCDESQWEPVCGNNGITYISPCLAACKSSSGNKKPIVFYNCSCLEVTGLQNRNYSAHLGECPRDDACTRKFYFFVAIQVLNLFFSALGGTSHVMLIVKIVQPELKSLALGFHSMVIRALGGILAPIYFGALIDTTCIKWSTNNCGTRGSCRTYNSTSFSRVYLGLSSMLRVSSLVLYIILIYAMKKKYQEKDINASENGSVMDEANLESLNKNKHFVPSAGADSETHC

SEQ ID NO: 13 - DNA, 2830 bp, Homo sapiens
  CDS (135)..(2210)
cggacgcgtgggcggacgcgtgggtcgcccacgcgtccgacttgttgcagttgctgtaggattctaaatccaggtgattgtttcaaactgagcatcaacaacaaaaacatttgtatgatatctatatttcaatcatggaccaaaatcaacatttgaataaaacagcagaggcacaaccttcagagaataagaaaacaagatactgcaatggattgaagatgttcttggcagctctgtcactcagctttattgctaagacactaggtgcaattattatgaaaagttccatcattcatatagaacggagatttgagatatcctcttctcttgttggttttattgacggaagctttgaaattggaaatttgcttgtgattgtatttgtgagttactttggatccaaactacatagaccaaagttaattggaatcggttgtttcattatgggaattggaggtgttttgactgctttgccacatttcttcatgggatattacaggtattctaaagaaactaatatcgattcatcagaaaattcaacatcgaccttatccacttgtttaattaatcaaattttatcactcaatagagcatcacctgagatagtgggaaaaggttgtttaaaggaatctgggtcatacatgtggatatatgtgttcatgggtaatatgcttcgtggaataggggagactcccatagtaccattggggctttcttacattgatgatttcgctaaagaaggacattcttctttgtatttaggtatattgaatgcaatagcaatgattggtccaatcattggctttaccctgggatctctgttttctaaaatgtacgtggatattggatatgtagatctaagcactatcaggataactcctactgattctcgatgggttggagcttggtggcttaatttccttgtgtctggactattctccattatttcttccataccattctttttcttgccccaaactccaaataaaccacaaaaagaaagaaaagcttcactgtctttgcatgtgctggaaacaaatgatgaaaaggatcaaacagctaatttgaccaatcaaggaaaaaatattaccaaaaatgtgactggttttttccagtcttttaaaagcatccttactaatcccctgtatgttatgtttgtgcttttgacgttgttacaagtaagcagctatattggtgcttttacttatgtcttcaaatacgtagagcaacagtatggtcagccttcatctaaggctaacatcttattgggagtcataaccatacctatttttgcaagtggaatgtttttaggaggatatatcattaaaaaattcaaactgaacaccgttggaattgccaaattctcatgttttactgctgtaatgtcattgtccttttacctattatattttttcatactctgtgaaaacaaatcagttgccggactaaccatgacctatgatggaaataatccagtgacatctcatagagatgtaccactttcttattgcaactcagactgcaattgtgatgaaagtcaatgggaaccagtctgtggaaacaatggaataacttacatctcaccctgtctagcaggttgcaaatcttcaagtggcaataaaaagcctatagtgttttacaactgcagttgtttggaagtaactggtctccagaacagaaattactcagcccatttgggtgaatgcccaagagatgatgcttgtacaaggaaattttacttttttgttgcaatacaagtcttgaatttatttttctctgcacttggaggcacctcacatgtcatgctgattgttaaaattgttcaacctgaattgaaatcacttgcactgggtttccactcaatggttatacgagcactaggaggaattctagctccaatatattttggggctctgattgatacaacgtgtataaagtggtccaccaacaactgtggcacacgtgggtcatgtaggacatataattccacatcattttcaagggtctacttgggcttgtcttcaatgttaagagtctcatcacttgttttatatattatattaatttatgccatgaagaaaaaatatcaagagaaagatatcaatgcatcagaaaatggaagtgtcatggatgaagcaaacttagaatccttaaataaaaataaacattttgtcccttctgctggggcagatagtgaaacacattgttaaggggagaaaaaaagccacttctgcttctgtgtttccaaacagcattgcattgattcagtaagatgttatttttgaggagttcctggtcctttcactaagaatttccacatcttttatggtggaagtataaataagcctatgaacttataataaaacaaactgtaggtagaaaaaatgagagtactcattgttacattatagctacatatttgtggttaaggttagactatatgatccatacaaattaaagtgagagacatggttactgtgtaataaaagaaaaaatacttgttcaggtaattctaattcttaataaaacaaatgagtatcatacaggtagaggttaaaaaggaggagctagattcatatcctaagtaaagagaaatgcctagtgtctattttattaaacaaacaaacacagagtttgaactataatactaaggcctgaagtctagcttggatatatgctacaataatatctgttactcacataaaattatatatttcacagactttatcaatgtataattaacaattatcttgtttaagtaaatttagaatacatttaagtattgtggaagaaataaagacattccaatatttgcaaaaaaaaaaaaaaa

SEQ ID NO: 14 - protein, 691 aa, Homo sapiens; identical to SEQ ID NO: 2

SEQ ID NO: 15 - DNA, 2830 bp, Homo sapiens
  CDS (135)..(2210)
cggacgcgtgggcggacgcgtgggtcgcccacgcgtccgacttgttgcagttgctgtaggattctaaatccaggtgattgtttcaaactgagcatcaacaacaaaaacatttgtatgatatctatatttcaatcatggaccaaaatcaacatttgaataaaacagcagaggcacaaccttcagagaataagaaaacaagatactgcaatggattgaagatgttcttggcagctctgtcactcagctttattgctaagacactaggtgcaattattatgaaaagttccatcattcatatagaacggagatttgagatatcctcttctcttgttggttttattgacggaagctttgaaattggaaatttgcttgtgattgtatttgtgagttactttggatccaaactacatagaccaaagttaattggaatcggttgtttcattatgggaattggaggtgttttgactgctttgccacatttcttcatgggatattacaggtattctaaagaaactaatatcgattcatcagaaaattcaacatcgaccttatccacttgtttaattaatcaaattttatcactcaatagagcatcacctgagatagtgggaaaaggttgtttaaaggaatctgggtcatacatgtggatatatgtgttcatgggtaatatgcttcgtggaataggggagactcccatagtaccattggggctttcttacattgatgatttcgctaaagaaggacattcttctttgtatttaggtatattgaatgcaatagcaatgattggtccaatcattggctttaccctgggatctctgttttctaaaatgtacgtggatattggatatgtagatctaagcactatcaggataactcctactgattctcgatgggttggagcttggtggcttaatttccttgtgtctggactattctccattatttcttccataccattctttttcttgccccaaactccaaataaaccacaaaaagaaagaaaagcttcactgtctttgcatgtgctggaaacaaatgatgaaaaggatcaaacagctaatttgaccaatcaaggaaaaaatattaccaaaaatgtgactggttttttccagtcttttaaaagcatccttactaatcccctgtatgttatgtttgtgcttttgacgttgttacaagtaagcagctatattggtgcttttacttatgtcttcaaatacgtagagcaacagtatggtcagccttcatctaaggctaacatcttattgggagtcataaccatacctatttttgcaagtggaatgtttttaggaggatatatcattaaaaaattgaaactgaacaccgttggaattgccaaattctcatgttttactgctgtgatgtcattgtccttttacctattatattttttcatactctgtgaaaacaaatcagttgccggactaaccatgacctatgatggaaataatccagtgacatctcatagagatgtaccactttcttattgcaactcagactgcaattgtgatgaaagtcaatgggaaccagtctgtggaaacaatggaataacttacatctcaccctgtctagcaggttgcaaatcttcaagtggcaataaaaagcctatagtgttttacaactgcagttgtttggaagtaactggtctccagaacagaaattactcagcccatttgggtgaatgcccaagagatgatgcttgtacaaggaaattttacttttttgttgcaatacaagtcttgaatttatttttctctgcacttggaggcacctcacatgtcatgctgattgttaaaattgttcaacctgaattgaaatcacttgcactgggtttccactcaatggttatacgagcactaggaggaattctagctccaatatattttggggctctgattgatacaacgtgtataaagtggtccaccaacaactgtggcacacgtgggtcatgtaggacatataattccacatcattttcaagggtctacttgggcttgtcttcaatgttaagagtctcatcacttgttttatatattatattaatttatgccatgaagaaaaaatatcaagagaaagatatcaatgcatcagaaaatggaagtgtcatggatgaagcaaacttagaatccttaaataaaaataaacattttgtcccttctgctggggcagatagtgaaacacattgttaaggggagaaaaaaagccacttctgcttctgtgtttccaaacagcattgcattgattcagtaagatgttatttttgaggagttcctggtcctttcactaagaatttccacatcttttatggtggaagtataaataagcctatgaacttataataaaacaaactgtaggtagaaaaaatgagagtactcattgttacattatagctacatatttgtggttaaggttagactatatgatccatacaaattaaagtgagagacatggttactgtgtaataaaagaaaaaatacttgttcaggtaattctaattcttaataaaacaaatgagtatcatacaggtagaggttaaaaaggaggagctagattcatatcctaagtaaagagaaatgcctagtgtctattttattaaacaaacaaacacagagtttgaactataatactaaggcctgaagtctagcttggatatatgctacaataatatctgttactcacataaaattatatatttcacagactttatcaatgtataattaacaattatcttgtttaagtaaatttagaatacatttaagtattgtggaagaaataaagacattccaatatttgcaaaaaaaaaaaaaaa

SEQ ID NO: 16 - protein, 691 aa, Homo sapiens
MDQNQHLNKTAEAQPSENKKTRYCNGLKMFLAALSLSFIAKTLGAIIMKSSIIHIERRFEISSSLVGFIDGSFEIGNLLVIVFVSYFGSKLHRPKLIGIGCFIMGIGGVLTALPHFFMGYYRYSKETNIDSSENSTSTLSTCLINQILSLNRASPEIVGKGCLKESGSYMWIYVFMGNMLRGIGETPIVPLGLSYIDDFAKEGHSSLYLGILNAIAMIGPIIGFTLGSLFSKMYVDIGYVDLSTIRITPTDSRWVGAWWLNFLVSGLFSIISSIPFFFLPQTPNKPQKERKASLSLHVLETNDEKDQTANLTNQGKNITKNVTGFFQSFKSILTNPLYVMFVLLTLLQVSSYIGAFTYVFKYVEQQYGQPSSKANILLGVITIPIFASGMFLGGYIIKKLKLNTVGIAKFSCFTAVMSLSFYLLYFFILCENKSVAGLTMTYDGNNPVTSHRDVPLSYCNSDCNCDESQWEPVCGNNGITYISPCLAGCKSSSGNKKPIVFYNCSCLEVTGLQNRNYSAHLGECPRDDACTRKFYFFVAIQVLNLFFSALGGTSHVMLIVKIVQPELKSLALGFHSMVIRALGGILAPIYFGALIDTTCIKWSTNNCGTRGSCRTYNSTSFSRVYLGLSSMLRVSSLVLYIILIYAMKKKYQEKDINASENGSVMDEANLESLNKNKHFVPSAGADSETHC

SEQ ID NO: 17 - DNA, 2830 bp, Homo sapiens
  CDS (135)..(2210)
cggacgcgtgggcggacgcgtgggtcgcccacgcgtccgacttgttgcagttgctgtaggattctaaatccaggtgattgtttcaaactgagcatcaacaacaaaaacatttgtatgatatctatatttcaatcatggaccaaaatcaacatttgaataaaacagcagaggcacaaccttcagagaataagaaaacaagatactgcaatggattgaagatgttcttggcagctctgtcactcagctttattgctaagacactaggtgcaattattatgaaaagttccatcattcatatagaacggagatttgagatatcctcttctcttgttggttttattgacggaagctttgaaattggaaatttgcttgtgattgtatttgtgagttactttggatccaaactacatagaccaaagttaattggaatcggttgtttcattatgggaattggaggtgttttgactgctttgccacatttcttcatgggatattacaggtattctaaagaaactaatatcgattcatcagaaaattcaacatcgaccttatccacttgtttaattaatcaaattttatcactcaatagagcatcacctgagatagtgggaaaaggttgtttaaaggaatctgggtcatacatgtggatatatgcgttcatgggtaatatgcttcgtggaataggggagactcccatagtaccattggggctttcttacattgatgatttcgctaaagaaggacattcttctttgtatttaggtatattgaatgcaatagcaatgattggtccaatcattggctttaccctgggatctctgttttctaaaatgtacgtggatattggatatgtagatctaagcactatcaggataactcctactgattctcgatgggttggagcttggtggcttaatttccttgtgtctggactattctccattatttcttccataccattctttttcttgccccaaactccaaataaaccacaaaaagaaagaaaagcttcactgtctttgcatgtgctggaaacaaatgatgaaaaggatcaaacagctaatttgaccaatcaaggaaaaaatattaccaaaaatgtgactggttttttccagtcttttaaaagcatccttactaatcccctgtatgttatgtttgtgcttttgacgttgttacaagtaagcagctatattggtgcttttacttatgtcttcaaatacgtagagcaacagtatggtcagccttcatctaaggctaacatcttattgggagtcataaccatacctatttttgcaagtggaatgtttttaggaggatatatcattaaaaaattcaaactgaacaccgttggaattgccaaattctcatgttttactgctgtgatgtcattgtccttttacctattatattttttcatactctgtgaaaacaaatcagttgccggactaaccatgacctatgatggaaataatccagtgacatctcatagagatgtaccactttcttattgcaactcagactgcaattgtgatgaaagtcaatgggaaccagtctgtggaaacaatggaataacttacatctcaccctgtctagcaggttgcaaatcttcaagtggcaataaaaagcctatagtgttttacaactgcagttgtttggaagtaactggtctccagaacagaaattactcagcccatttgggtgaatgcccaagagatgatgcttgtacaaggaaattttacttttttgttgcaatacaagtcttgaatttatttttctctgcacttggaggcacctcacatgtcatgctgattgttaaaattgttcaacctgaattgaaatcacttgcactgggtttccactcaatggttatacgagcactaggaggaattctagctccaatatattttggggctctgattgatacaacgtgtataaagtggtccaccaacaactgtggcacacgtgggtcatgtaggacatataattccacatcattttcaagggtctacttgggcttgtcttcaatgttaagagtctcatcacttgttttatatattatattaatttatgccatgaagaaaaaatatcaagagaaagatatcaatgcatcagaaaatggaagtgtcatggatgaagcaaacttagaatccttaaataaaaataaacattttgtcccttctgctggggcagatagtgaaacacattgttaaggggagaaaaaaagccacttctgcttctgtgtttccaaacagcattgcattgattcagtaagatgttatttttgaggagttcctggtcctttcactaagaatttccacatcttttatggtggaagtataaataagcctatgaacttataataaaacaaactgtaggtagaaaaaatgagagtactcattgttacattatagctacatatttgtggttaaggttagactatatgatccatacaaattaaagtgagagacatggttactgtgtaataaaagaaaaaatacttgttcaggtaattctaattcttaataaaacaaatgagtatcatacaggtagaggttaaaaaggaggagctagattcatatcctaagtaaagagaaatgcctagtgtctattttattaaacaaacaaacacagagtttgaactataatactaaggcctgaagtctagcttggatatatgctacaataatatctgttactcacataaaattatatatttcacagactttatcaatgtataattaacaattatcttgtttaagtaaatttagaatacatttaagtattgtggaagaaataaagacattccaatatttgcaaaaaaaaaaaaaaa

SEQ ID NO: 18 - protein, 691 aa, Homo sapiens
MDQNQHLNKTAEAQPSENKKTRYCNGLKMFLAALSLSFIAKTLGAIIMKSSIIHIERRFEISSSLVGFIDGSFEIGNLLVIVFVSYFGSKLHRPKLIGIGCFIMGIGGVLTALPHFFMGYYRYSKETNIDSSENSTSTLSTCLINQILSLNRASPEIVGKGCLKESGSYMWIYAFMGNMLRGIGETPIVPLGLSYIDDFAKEGHSSLYLGILNAIAMIGPIIGFTLGSLFSKMYVDIGYVDLSTIRITPTDSRWVGAWWLNFLVSGLFSIISSIPFFFLPQTPNKPQKERKASLSLHVLETNDEKDQTANLTNQGKNITKNVTGFFQSFKSILTNPLYVMFVLLTLLQVSSYIGAFTYVFKYVEQQYGQPSSKANILLGVITIPIFASGMFLGGYIIKKFKLNTVGIAKFSCFTAVMSLSFYLLYFFILCENKSVAGLTMTYDGNNPVTSHRDVPLSYCNSDCNCDESQWEPVCGNNGITYISPCLAGCKSSSGNKKPIVFYNCSCLEVTGLQNRNYSAHLGECPRDDACTRKFYFFVAIQVLNLFFSALGGTSHVMLIVKIVQPELKSLALGFHSMVIRALGGILAPIYFGALIDTTCIKWSTNNCGTRGSCRTYNSTSFSRVYLGLSSMLRVSSLVLYIILIYAMKKKYQEKDINASENGSVMDEANLESLNKNKHFVPSAGADSETHC

SEQ ID NO: 19 - DNA, 2830 bp, Homo sapiens
  CDS (135)..(2210)
cggacgcgtgggcggacgcgtgggtcgcccacgcgtccgacttgttgcagttgctgtaggattctaaatccaggtgattgtttcaaactgagcatcaacaacaaaaacatttgtatgatatctatatttcaatcatggaccaaaatcaacatttgaataaaacagcagaggcacaaccttcagagaataagaaaacaagatactgcaatggattgaagatgttcttggcagctctgtcactcagctttattgctaagacactaggtgcaattattatgaaaagttccatcattcatatagaacggagatttgagatatcctcttctcttgttggttttattgacggaagctttgaaattggaaatttgcttgtgattgtatttgtgagttactttggatccaaactacatagaccaaagttaattggaatcggttgtttcattatgggaattggaggtgttttgactgctttgccacatttcttcatgggatattacaggtattctaaagaaactaatatcgattcatcagaaaattcaacatcgaccttatccacttgtttaattaatcaaattttatcactcaatagagcatcacctgagatagtgggaaaaggttgtttaaaggaatctgggtcatacatgtggatatatgtgttcatgggtaatatgcttcgtggaataggggagactcccatagtaccactggggctttcttacattgatgatttcgctaaagaaggacattcttctttgtatttaggtatattgaatgcaatagcaatgattggtccaatcattggctttaccctgggatctctgttttctaaaatgtacgtggatattggatatgtagatctaagcactatcaggataactcctactgattctcgatgggttggagcttggtggcttaatttccttgtgtctggactattctccattatttcttccataccattctttttcttgccccaaactccaaataaaccacaaaaagaaagaaaagcttcactgtctttgcatgtgctggaaacaaatgatgaaaaggatcaaacagctaatttgaccaatcaaggaaaaaatattaccaaaaatgtgactggttttttccagtcttttaaaagcatccttactaatcccctgtatgttatgtttgtgcttttgacgttgttacaagtaagcagctatattggtgcttttacttatgtcttcaaatacgtagagcaacagtatggtcagccttcatctaaggctaacatcttattgggagtcataaccatacctatttttgcaagtggaatgtttttaggaggatatatcattaaaaaattcaaactgaacaccgttggaattgccaaattctcatgttttactgctgtgatgtcattgtccttttacctattatattttttcatactctgtgaaaacaaatcagttgccggactaaccatgacctatgatggaaataatccagtgacatctcatagagatgtaccactttcttattgcaactcagactgcaattgtgatgaaagtcaatgggaaccagtctgtggaaacaatggaataacttacatctcaccctgtctagcaggttgcaaatcttcaagtggcaataaaaagcctatagtgttttacaactgcagttgtttggaagtaactggtctccagaacagaaattactcagcccatttgggtgaatgcccaagagatgatgcttgtacaaggaaattttacttttttgttgcaatacaagtcttgaatttatttttctctgcacttggaggcacctcacatgtcatgctgattgttaaaattgttcaacctgaattgaaatcacttgcactgggtttccactcaatggttatacgagcactaggaggaattctagctccaatatattttggggctctgattgatacaacgtgtataaagtggtccaccaacaactgtggcacacgtgggtcatgtaggacatataattccacatcattttcaagggtctacttgggcttgtcttcaatgttaagagtctcatcacttgttttatatattatattaatttatgccatgaagaaaaaatatcaagagaaagatatcaatgcatcagaaaatggaagtgtcatggatgaagcaaacttagaatccttaaataaaaataaacattttgtcccttctgctggggcagatagtgaaacacattgttaaggggagaaaaaaagccacttctgcttctgtgtttccaaacagcattgcattgattcagtaagatgttatttttgaggagttcctggtcctttcactaagaatttccacatcttttatggtggaagtataaataagcctatgaacttataataaaacaaactgtaggtagaaaaaatgagagtactcattgttacattatagctacatatttgtggttaaggttagactatatgatccatacaaattaaagtgagagacatggttactgtgtaataaaagaaaaaatacttgttcaggtaattctaattcttaataaaacaaatgagtatcatacaggtagaggttaaaaaggaggagctagattcatatcctaagtaaagagaaatgcctagtgtctattttattaaacaaacaaacacagagtttgaactataatactaaggcctgaagtctagcttggatatatgctacaataatatctgttactcacataaaattatatatttcacagactttatcaatgtataattaacaattatcttgtttaagtaaatttagaatacatttaagtattgtggaagaaataaagacattccaatatttgcaaaaaaaaaaaaaaa

SEQ ID NO: 20 - protein, 691 aa, Homo sapiens; identical to SEQ ID NO: 2

SEQ ID NO: 21 - DNA, 2830 bp, Homo sapiens
  CDS (135)..(2210)
cggacgcgtgggcggacgcgtgggtcgcccacgcgtccgacttgttgcagttgctgtaggattctaaatccaggtgattgtttcaaactgagcatcaacaacaaaaacatttgtatgatatctatatttcaatcatggaccaaaatcaacatttgaataaaacagcagaggcacaaccttcagagaataagaaaacaagatactgcaatggattgaagatgttcttggcagctctgtcactcagctttattgctaagacactaggtgcaattattatgaaaagttccatcattcatatagaacggagatttgagatatcctcttctcttgttggttttattgacggaagctttgaaattggaaatttgcttgtgattgtatttgtgagttactttggatccaaactacatagaccaaagttaattggaatcggttgtttcattatgggaattggaggtgttttgactgctttgccacatttcttcatgggatattacaggtattctaaagaaactaatatcgattcatcagaaaattcaacatcgaccttatccacttgtttaattaatcaaattttatcactcaatagagcatcacctgagatagtgggaaaaggttgtttaaaggaatctgggtcatacatgtggatatatgtgttcatgggtaatatgcttcgtggaataggggagactcccatagtaccattggggctttcttacattgatgattttgctaaagaaggacattcttctttgtatttaggtatattgaatgcaatagcaatgattggtccaatcattggctttaccctgggatctctgttttctaaaatgtacgtggatattggatatgtagatctaagcactatcaggataactcctactgattctcgatgggttggagcttggtggcttaatttccttgtgtctggactattctccattatttcttccataccattctttttcttgccccaaactccaaataaaccacaaaaagaaagaaaagcttcactgtctttgcatgtgctggaaacaaatgatgaaaaggatcaaacagctaatttgaccaatcaaggaaaaaatattaccaaaaatgtgactggttttttccagtcttttaaaagcatccttactaatcccctgtatgttatgtttgtgcttttgacgttgttacaagtaagcagctatattggtgcttttacttatgtcttcaaatacgtagagcaacagtatggtcagccttcatctaaggctaacatcttattgggagtcataaccatacctatttttgcaagtggaatgtttttaggaggatatatcattaaaaaattcaaactgaacaccgttggaattgccaaattctcatgttttactgctgtgatgtcattgtccttttacctattatattttttcatactctgtgaaaacaaatcagttgccggactaaccatgacctatgatggaaataatccagtgacatctcatagagatgtaccactttcttattgcaactcagactgcaattgtgatgaaagtcaatgggaaccagtctgtggaaacaatggaataacttacatctcaccctgtctagcaggttgcaaatcttcaagtggcaataaaaagcctatagtgttttacaactgcagttgtttggaagtaactggtctccagaacagaaattactcagcccatttgggtgaatgcccaagagatgatgcttgtacaaggaaattttacttttttgttgcaatacaagtcttgaatttatttttctctgcacttggaggcacctcacatgtcatgctgattgttaaaattgttcaacctgaattgaaatcacttgcactgggtttccactcaatggttatacgagcactaggaggaattctagctccaatatattttggggctctgattgatacaacgtgtataaagtggtccaccaacaactgtggcacacgtgggtcatgtaggacatataattccacatcattttcaagggtctacttgggcttgtcttcaatgttaagagtctcatcacttgttttatatattatattaatttatgccatgaagaaaaaatatcaagagaaagatatcaatgcatcagaaaatggaagtgtcatggatgaagcaaacttagaatccttaaataaaaataaacattttgtcccttctgctggggcagatagtgaaacacattgttaaggggagaaaaaaagccacttctgcttctgtgtttccaaacagcattgcattgattcagtaagatgttatttttgaggagttcctggtcctttcactaagaatttccacatcttttatggtggaagtataaataagcctatgaacttataataaaacaaactgtaggtagaaaaaatgagagtactcattgttacattatagctacatatttgtggttaaggttagactatatgatccatacaaattaaagtgagagacatggttactgtgtaataaaagaaaaaatacttgttcaggtaattctaattcttaataaaacaaatgagtatcatacaggtagaggttaaaaaggaggagctagattcatatcctaagtaaagagaaatgcctagtgtctattttattaaacaaacaaacacagagtttgaactataatactaaggcctgaagtctagcttggatatatgctacaataatatctgttactcacataaaattatatatttcacagactttatcaatgtataattaacaattatcttgtttaagtaaatttagaatacatttaagtattgtggaagaaataaagacattccaatatttgcaaaaaaaaaaaaaaa

SEQ ID NO: 22 - protein, 691 aa, Homo sapiens; identical to SEQ ID NO: 2

SEQ ID NO: 23 - DNA, 5300 bp, Homo sapiens; identical to SEQ ID NO: 3
  CDS (102)..(4739)

SEQ ID NO: 24 - protein, 1545 aa, Homo sapiens [sequence omitted]

SEQ ID NO: 25 - DNA, 5300 bp, Homo sapiens
  CDS (102)..(4739)
aggataattcctgttccactttctttgatgaaacaagtaaagaagaaacaacacaatcatattaatagaagagtcttcgttccagacgcagtccaggaatcatgctggagaagttctgcaactctactttttggaattcctcattcctggacagtccggaggcagacctgccactttgttttgagcaaactgttctggtgtggattcccttgggcttcctatggctcctggccccctggcagcttctccacgtgtataaatccaggaccaagagatcctctaccaccaaactctatcttgctaagcaggtattcgttggttttcttcttattctagcagccatagagctggcccttgtactcacagaagactctggacaagccacagtccctgctgttcgatataccaatccaagcctctacctaggcacatggctcctggttttgctgatccaatacagcagacaatggtgtgtacagaaaaactcctggttcctgtccctattctggattctctcgatactctgtggcactttccaatttcagactctgatccggacactcttacagggtgacaattctaatctagcctactcctgcctgttcttcatctcctacggattccagatcctgatcctgatcttttcagcattttcagaaaataatgagtcatcaaataatccatcatccatagcttcattcctgagtagcattacctacagctggtatgacagcatcattctgaaaggctacaagcgtcctctgacactcgaggatgtctgggaagttgatgaagagatgaaaaccaagacattagtgagcaagtttgaaacgcacatgaagagagagctgcagaaagccaggcgggcactccagagacggcaggagaagagctcccagcagaactctggagccaggctgcctggcttgaacaagaatcagagtcaaagccaagatgcccttgtcctggaagatgttgaaaagaaaaaaaagaagtctgggaccaaaaaagatgttccaaaatcctggttgatgaaggctctgttcaaaactttctacatggtgctcctgaaatcattcctactgaagctagtgaatgacatcttcacgtttgtgagtcctcagctgctgaaattgctgatctcctttgcaagtgaccgtgacacatatttgtggattggatatctctgtgcaatcctcttattcactgcggctctcattcagtctttctgccttcagtgttatttccaactgtgcttcaagctgggtgtaaaagtacggacagctatcatggcttctgtatataagaaggcattgaccctatccaacttggccaggaaggagtacaccgttggagaaacagtgaacctgatgtctgtggatgcccagaagctcatggatgtgaccaacttcatgcacatgctgtggtcaagtgttctacagattgtcttatctatcttcttcctatggagagagttgggaccctcagtcttagcaggtgttggggtgatggtgcttgtaatcccaattaatgcgatactgtccaccaagagtaagaccattcaggtcaaaaatatgaagaataaagacaaacgtttaaagatcatgaatgagattcttagtggaatcaagatcctgaaatattttgcctgggaaccttcattcagagaccaagtacaaaacctccggaagaaagagctcaagaacctgctggcctttagtcaactacagtgtgtagtaatattcgtcttccagttaactccagtcctggtatctgtggtcacattttctgtttatgtcctggtggatagcaacaatattttggatgcacaaaaggccttcacctccattaccctcttcaatatcctgcgctttcccctgagcatgcttcccatgatgatctcctccatgctccaggccagtgtttccacagagcggctagagaagtacttgggaggggatgacttggacacatctgccattcgacatgactgcaattttgacaaagccatgcagttttctgaggcctcctttacctgggaacatgattcggaagccacagtccgagatgtgaacctggacattatggcaggccaacttgtggctgtgataggccctgtcggctctgggaaatcctccttgatatcagccatgctgggagaaatggaaaatgtccacgggcacatcaccatcaagggcaccactgcctatgtcccacagcagtcctggattcagaatggcaccataaaggacaacatcctttttggaacagagtttaatgaaaagaggtaccagcaagtactggaggcctgtgctctcctcccagacttggaaatgctgcctggaggagatttggctgagattggagagaagggtataaatcttagtgggggtcagaagcagcggatcagcctggccagagctacctaccaaaatttagacatctatcttctagatgaccccctgtctgcagtggatgctcatgtaggaaaacatatttttaataaggtcttgggccccaatggcctgttgaaaggcaagactcgactcttggttacacatagcatgcactttcttcctcaagtggatgagattgtagttctggggaatggaacaattgtagagaaaggatcctacagtgctctcctggccaaaaaaggagagtttgctaagaatctgaagacatttctaagacatacaggccctgaagaggaagccacagtccatgatggcagtgaagaagaagacgatgactatgggctgatatccagtgtggaagagatccccgaagatgcagcctccataaccatgagaagagagaacagctttcgtcgaacacttagccgcagttctaggtccaatggcaggcatctgaagtccctgagaaactccttgaaaactcggaatgtgaatagcctgaaggaagacgaagaactagtgaaaggacaaaaactaattaagaaggaattcatagaaactggaaaggtgaagttctccatctacctggagtacctacaagcaataggattgttttcgatattcttcatcatccttgcgtttgtgatgaattctgtggcttttattggatccaacctctggctcagtgcttggaccagtgactctaaaatcttcaatagcaccgactatccagcatctcagagggacatgagagttggagtctacggagctctgggattagcccaaggtatatttgtgttcatagcacatttctggagtgcctttggtttcgtccatgcatcaaatatcttgcacaagcaactgctgaacaatatccttcgagcacctatgagattttttgacacaacacccacaggccggattgtgaacaggtttgccggcgatatttccacagtggatgacaccctgcctcagtccttgcgcagctggattacatgcttcctggggataatcagcacccttgtcatgatctgcatggccactcctgtcttcaccatcatcgtcattcctcttggcattatttatgtatctgttcagatgttttatgtgtctacctcccgccagctgaggcgtctggactctgtcaccaggtccccaatctactctcacttcagcgagaccgtatcaggtttgccagttatccgtgcctttgagcaccagcagcgatttctgaaacacaatgaggagaggattgacaccaaccagaaatgtgtcttttcctggatcacctccaacaggtggcttgcaattcgcctggagctggttgggaacctgactgtcttcttttcagccttgatgatggttatttatagagataccctaagtggggacactgttggctttgttctgtccaatgcactcaatatcacacaaaccctgaactggctggtgaggatgacatcagaaatagagaccaacattgtggctgttgagcgaataactgagtacacaaaagtggaaaatgaggcaccctgggtgactgataagaggcctccgccagattggcccagcaaaggcaagatccagtttaacaactaccaagtgcggtaccgacctgagctggatctggtcctcagagggatcacttgtgacattggtagcatggagaagattggtgtggtgggcaggacaggagctggaaagtcatccctcacaaactgcctcttcagaatcttagaggctgccggtggtcagattatcattgatggagtagatattgcttccattgggctccacgacctccgagagaagctgaccatcatcccccaggaccccatcctgttctctggaagcctgaggatgaatctcgaccctttcaacaactactcagatgaggagatttggaaggccttggagctggctcacctcaagtcttttgtggccagcctgcaacttgggttatcccacgaagttacagaggctggtggcaacctgagcataggccagaggcagctgctgtgcctgggcagggctctgcttcggaaatccaagatcctggtcctggatgaggccactgctgcggtggatctagagacagacaacctcattcagacgaccatccaaaacgagttcgcccactgcacagtgatcaccatcgcccacaggctgcataccatcatggacagtgacaaggtaatggtcctagacaacgggaagattatagagtacggcagccctgaagaactgctacaaatccctggacccttttactttatggctaaggaagctggcattgagaatgtgaacagcacaaaattctagcagaaggccccatgggttagaaaaggactataagaataatttcttatttaattttattttttataaaatacagaatacatacaaaagtgtgtataaaatgtacgttttaaaaaaggataagtgaacacccatgaacctactacccaggttaagaaaataaatgtcaccaggtacttgagaaacccctcgattgtctacctcgatcgtacttccttgctacccacccctcccagggacaaccactgtcctgaatttcacgataattattcctttgcctttcatttctgttttatcacctttgtatgtatctttaaacaacatatacccttttttacttatgtaaatggactgactcatactgcatacatcttctatgacttgattcttttgttcaatattatatctgagattcatccatggtgatgcaaataggtgcattattttttttcactgctctgtagtctggcattgtatgaatacagcacaatgtatcagttttaatattggggatcattagcattattctcaggtttttaaaaattataagcagtactactatgg

SEQ ID NO: 26 - protein, 1545 aa, Homo sapiens [sequence omitted]

SEQ ID NO: 27 - DNA, 5300 bp, Homo sapiens
  CDS (102)..(4739)
aggataattcctgttccactttctttgatgaaacaagtaaagaagaaacaacacaatcatattaatagaagagtcttcgttccagacgcagtccaggaatcatgctggagaagttctgcaactctactttttggaattcctcattcctggacagtccggaggcagacctgccactttgttttgagcaaactgttctggtgtggattcccttgggcttcctatggctcctggccccctggcagcttctccacgtgtataaatccaggaccaagagatcctctaccaccaaactctatcttgctaagcaggtattcgttggttttcttcttattctagcagccatagagctggcccttgtactcacagaagactctggacaagccacagtccctgctgttcgatataccaatccaagcctctacctaggcacatggctcctggttttgctgatccaatacagcagacaatggtgtgtacagaaaaactcctggttcctgtccctattctggattctctcgatactctgtggcactttccaatttcagactctgatccggacactcttacagggtgacaattctaatctagcctactcctgcctgttcttcatctcctacggattccagatcctgatcctgatcttttcagcattttcagaaaataatgagtcatcaaataatccatcatccatagcttcattcctgagtagcattacctacagctggtatgacagcatcattctgaaaggctacaagcgtcctctgacactcgaggatgtctgggaagttgatgaagagatgaaaaccaagacattagtgagcaagtttgaaacgcacatgaagagagagctgcagaaagccaggcgggcactccagagacggcaggagaagagctcccagcagaactctggagccaggctgcctggcttgaacaagaatcagagtcaaagccaagatgcccttgtcctggaagatgttgaaaagaaaaaaaagaagtctgggaccaaaaaagatgttccaaaatcctggttgatgaaggctctgttcaaaactttctacatggtgctcctgaaatcattcctactgaagctagtgaatgacatcttcacgtttgtgagtcctcagctgctgaaattgctgatctcctttgcaagtgaccgtgacacatatttgtggattggatatctctgtgcaatcctcttattcactgcggctctcattcagtctttctgccttcagtgttatttccaactgtgcttcaagctgggtgtaaaagtacggacagctatcatggcttctgtatataagaaggcattgaccctatccaacttggccaggaaggagtacaccgttggagaaacagtgaacctgatgtctgtggatgcccagaagctcatggatgtgaccaacttcatgcacatgctgtggtcaagtgttctacagattgtcttatctatcttcttcctatggagagagttgggaccctcagtcttagcaggtgttggggtgatggtgcttgtaatcccaattaatgcgatactgtccaccaagagtaagaccattcaggtcaaaaatatgaagaataaagacaaacgtttaaagatcatgaatgagattcttagtggaatcaagatcctgaaatattttgcctgggaaccttcattcagagaccaagtacaaaacctccggaagaaagagctcaagaacctgctggcctttagtcaactacagtgtgtagtaatattcgtcttccagttaactccagtcctggtatctgtggtcacattttctgtttatgtcctggtggatagcaacaatattttggatgcacaaaaggccttcacctccattaccctcttcaatatcctgcgctttcccctgagcatgcttcccatgatgatctcctccatgctccaggccagtgtttccacagagcggctagagaagtacttgggaggggatgacttggacacatctgccattcgacatgactgcaattttgacaaagccatgcagttttctgaggcctcctttacctgggaacatgattcggaagccacagtccgagatgtgaacctggacattatggcaggccaacttgtggctgtgataggccctgtcggctctgggaaatcctccttgatatcagccatgctgggagaaatggaaaatgtccacgggcacatcaccatcaagggcaccactgcctatgtcccacagcagtcctggattcagaatggcaccataaaggacaacatcctttttggaacagagtttaatgaaaagaggtaccagcaagtactggaggcctgtgctctcctcccagacttggaaatgctgcctggaggagatttggctgagattggagagaagggtataaatcttagtgggggtcagaagcagcggatcagcctggccagagctacctaccaaaatttagacatctatcttctagatgaccccctgtctgcagtggatgctcatgtaggaaaacatatttttaataaggtcttgggccccaatggcctgttgaaaggcaagactcgactcttggttacacatagcatgcactttcttcctcaagtggatgagattgtagttctggggaatggaacaattgtagagaaaggatcctacagtgctctcctggccaaaaaaggagagtttgctaagaatctgaagacatttctaagacatacaggccctgaagaggaagccacagtccatgatggcagtgaagaagaagacgatgactatgggctgatatccagtgtggaagagatccccgaagatgcagcctccataaccatgagaagagagaacagctttcgtcgaacacttagccgcagttctaggtccaatggcaggcatctgaagtccctgagaaactccttgaaaactcggaatgtgaatagcctgaaggaagacgaagaactagtgaaaggacaaaaactaattaagaaggaattcatagaaactggaaaggtgaagttctccatctacctggagtacctacaagcaataggattgttttcgatattcttcatcatccttgcgtttgtgatgaattctgtggcttttattggatccaacctctggctcagtgcttggaccagtgactctaaaatcttcaatagcaccgactatccagcatctcagagggacatgagagttggagtctacggagctctgggattagcccaaggtatatttgtgttcatagcacatttctggagtgcctttggtttcgtccatgcatcaaatatcttgcacaagcaactgctgaacaatatccttcgagcacctatgagattttttgacacaacacccacaggccggattgtgaacaggtttgccggcgatatttccacagtggatgacaccctgcctcagtccttgcgcagctggattacatgcttcctggggataatcagcacccttgtcatgatctgcatggccactcctgtcttcaccatcatcgtcattcctcttggcattatttatgtatctgttcagatgttttatgtgtctacctcccgccagctgaggcgtctggactctgtcaccaggtccccaatctactctcacttcagcgagaccgtatcaggtttgccagttatccgtgcctttgagcaccagcagcgatttctgaaacacaatgaggagaggattgacaccaaccagaaatgtgtcttttcctggatcacctccaacaggtggcttgcaattcgcctggagctggttgggaacctgactgtcttcttttcagccttgatgatggttatttatagagataccctaagtggggacactgttggctttgttctgtccaatgcactcaatatcacacaaaccctgaactggctggtgaggatgacatcagaaatagagaccaacattgtggctgttgagcgaataactgagtacacaaaagtggaaaatgaggcaccctgggtgactgataagaggcctccgccagattggcccagcaaaggcaagatccagtttaacaactaccaagtgcggtaccgacctgagctggatctggtcctcagagggatcacttgtgacatcggtagcatggagaagattggtgtggtgggcaggacaggagctggaaagtcatccctcacaaactgcctcttcagaatcttagaggctgccggtggtcagattatcattgatggagtagatattgcttccattgggcttcacgacctccgagagaagctgaccatcatcccccaggaccccatcctgttctctggaagcctgaggatgaatctcgaccctttcaacaactactcagatgaggagatttggaaggccttggagctggctcacctcaagtcttttgtggccagcctgcaacttgggttatcccacgaagttacagaggctggtggcaacctgagcataggccagaggcagctgctgtgcctgggcagggctctgcttcggaaatccaagatcctggtcctggatgaggccactgctgcggtggatctagagacagacaacctcattcagacgaccatccaaaacgagttcgcccactgcacagtgatcaccatcgcccacaggctgcataccatcatggacagtgacaaggtaatggtcctagacaacgggaagattatagagtacggcagccctgaagaactgctacaaatccctggacccttttactttatggctaaggaagctggcattgagaatgtgaacagcacaaaattctagcagaaggccccatgggttagaaaaggactataagaataatttcttatttaattttattttttataaaatacagaatacatacaaaagtgtgtataaaatgtacgttttaaaaaaggataagtgaacacccatgaacctactacccaggttaagaaaataaatgtcaccaggtacttgagaaacccctcgattgtctacctcgatcgtacttccttgctacccacccctcccagggacaaccactgtcctgaatttcacgataattattcctttgcctttcatttctgttttatcacctttgtatgtatctttaaacaacatatacccttttttacttatgtaaatggactgactcatactgcatacatcttctatgacttgattcttttgttcaatattatatctgagattcatccatggtgatgcaaataggtgcattattttttttcactgctctgtagtctggcattgtatgaatacagcacaatgtatcagttttaatattggggatcattagcattattctcaggtttttaaaaattataagcagtactactatgg

SEQ ID NO: 28 - protein, 1545 aa, Homo sapiens [sequence omitted]

SEQ ID NO: 29 - DNA, 5300 bp, Homo sapiens
  CDS (102)..(4739)
aggataattcctgttccactttctttgatgaaacaagtaaagaagaaacaacacaatcatattaatagaagagtcttcgttccagacgcagtccaggaatcatgctggagaagttctgcaactctactttttggaattcctcattcctggacagtccggaggcagacctgccactttgttttgagcaaactgttctggtgtggattcccttgggcttcctatggctcctggccccctggcagcttctccacgtgtataaatccaggaccaagagatcctctaccaccaaactctatcttgctaagcaggtattcgttggttttcttcttattctagcagccatagagctggcccttgtactcacagaagactctggacaagccacagtccctgctgttcgatataccaatccaagcctctacctaggcacatggctcctggttttgctgatccaatacagcagacaatggtgtgtacagaaaaactcctggttcctgtccctattctggattctctcgatactctgtggcactttccaatttcagactctgatccggacactcttacagggtgacaattctaatctagcctactcctgcctgttcttcatctcctacggattccagatcctgatcctgatcttttcagcattttcagaaaataatgagtcatcaaataatccatcatccatagcttcattcctgagtagcattacctacagctggtatgacagcatcattctgaaaggctacaagcgtcctctgacactcgaggatgtctgggaagttgatgaagagatgaaaaccaagacattagtgagcaagtttgaaacgcacatgaagagagagctgcagaaagccaggcgggcactccagagacggcaggagaagagctcccagcagaactctggagccaggctgcctggcttgaacaagaatcagagtcaaagccaagatgcccttgtcctggaagatgttgaaaagaaaaaaaagaagtctgggaccaaaaaagatgttccaaaatcctggttgatgaaggctctgttcaaaactttctacatggtgctcctgaaatcattcctactgaagctagtgaatgacatcttcacgtttgtgagtcctcagctgctgaaattgctgatctcctttgcaagtgaccgtgacacatatttgtggattggatatctctgtgcaatcctcttattcactgcggctctcattcagtctttctgccttcagtgttatttccaactgtgcttcaagctgggtgtaaaagtacggacagctatcatggcttctgtatataagaaggcattgaccctatccaacttggccaggaaggagtacaccgttggagaaacagtgaacctgatgtctgtggatgcccagaagctcatggatgtgaccaacttcatgcacatgctgtggtcaagtgttctacagattgtcttatctatcttcttcctatggagagagttgggaccctcagtcttagcaggtgttggggtgatggtgcttgtaatcccaattaatgcgatactgtccaccaagagtaagaccattcaggtcaaaaatatgaagaataaagacaaacgtttaaagatcatgaatgagattcttagtggaatcaagatcctgaaatattttgcctgggaaccttcattcagagaccaagtacaaaacctccggaagaaagagctcaagaacctgctggcctttagtcaactacagtgtgtagtaatattcgtcttccagttaactccagtcctggtatctgtggtcacattttctgtttatgtcctggtggatagcaacaatattttggatgcacaaaaggccttcacctccattaccctcttcaatatcctgcgctttcccctgagcatgcttcccatgatgatctcctccatgctccaggccagtgtttccacagagcggctagagaagtacttgggaggggatgacttggacacatctgccattcgacatgactgcaattttgacaaagccatgcagttttctgaggcctcctttacctgggaacatgattcggaagccacagtccgagatgtgaacctggacattatggcaggccaacttgtggctgtgataggccctgtcggctctgggaaatcctccttgatatcagccatgctgggagaaatggaaaatgtccacgggcacatcaccatcaagggcaccactgcctatgtcccacagcagtcctggattcagaatggcaccataaaggacaacatcctttttggaacagagtttaatgaaaagaggtaccagcaagtactggaggcctgtgctctcctcccagacttggaaatgctgcctggaggagatttggctgagattggagagaagggtataaatcttagtgggggtcagaagcagcggatcagcctggccagagctacctaccaaaatttagacatctatcttctagatgaccccctgtctgcagtggatgctcatgtaggaaaacatatttttaataaggtcttgggccccaatggcctgttgaaaggcaagactcgactcttggttacacatagcatgcactttcttcctcaagtggatgagattgtagttctggggaatggaacaattgtagagaaaggatcctacagtgctctcctggccaaaaaaggagagtttgctaagaatctgaagacatttctaagacatacaggccctgaagaggaagccacagtccatgatggcagtgaagaagaagacgatgactatgggctgatatccagtgtggaagagatccccgaagatgcagcctccataaccatgagaagagagaacagctttcgtcgaacacttagccgcagttctaggtccaatggcaggcatctgaagtccctgagaaactccttgaaaactcggaatgtgaatagcctgaaggaagacgaagaactagtgaaaggacaaaaactaattaagaaggaattcatagaaactggaaaggtgaagttctccatctacctggagtacctacaagcaataggattgttttcgatattcttcatcatccttgcgtttgtgatgaattctgtggcttttattggatccaacctctggctcagtgcttggaccagtgactctaaaatcttcaatagcaccgactatccagcatctcagagggacatgagagttggagtctacggagctctgggattagcccaaggtatatttgtgttcatagcacatttctggagtgcctttggtttcgtccatgcatcaaatatcttgcacaagcaactgctgaacaatatccttcgagcacctatgagattttttgacacaacacccacaggccggattgtgaacaggtttgccggcgatatttccacagtggatgacaccctgcctcagtccttgcgcagctggattacatgcttcctggggataatcagcacccttgtcatgatctgcatggccactcctgtcttcaccatcatcgtcattcctcttggcattatttatgtatctgttcagatgttttatgtgtctacctcccgccagctgaggcgtctggactctgtcaccaggtccccaatctactctcacttcagcgagaccgtatcaggtttgccagttatccgtgcctttgagcaccagcagcgatttctgaaacacaatgaggagaggattgacaccaaccagaaatgtgtcttttcctggatcacctccaacaggtggcttgcaattcgcctggagctggttgggaacctgactgtcttcttttcagccttgatgatggttatttatagagataccctaagtggggacactgttggctttgttctgtccaatgcactcaatatcacacaaaccctgaactggctggtgaggatgacatcagaaatagagaccaacattgtggctgttgagcgaataactgagtacacaaaagtggaaaatgaggcaccctgggtgactgataagaggcctccgccagattggcccagcaaaggcaagatccagtttaacaactaccaagtgcggtaccgacctgagctggatctggtcctcagagggatcacttgtgacatcggtagcatggagaagattggtgtggtgggcaggacaggagctggaaagtcatccctcacaaactgcctcttcagaatcttagaggctgctggtggtcagattatcattgatggagtagatattgcttccattgggctccacgacctccgagagaagctgaccatcatcccccaggaccccatcctgttctctggaagcctgaggatgaatctcgaccctttcaacaactactcagatgaggagatttggaaggccttggagctggctcacctcaagtcttttgtggccagcctgcaacttgggttatcccacgaagttacagaggctggtggcaacctgagcataggccagaggcagctgctgtgcctgggcagggctctgcttcggaaatccaagatcctggtcctggatgaggccactgctgcggtggatctagagacagacaacctcattcagacgaccatccaaaacgagttcgcccactgcacagtgatcaccatcgcccacaggctgcataccatcatggacagtgacaaggtaatggtcctagacaacgggaagattatagagtacggcagccctgaagaactgctacaaatccctggacccttttactttatggctaaggaagctggcattgagaatgtgaacagcacaaaattctagcagaaggccccatgggttagaaaaggactataagaataatttcttatttaattttattttttataaaatacagaatacatacaaaagtgtgtataaaatgtacgttttaaaaaaggataagtgaacacccatgaacctactacccaggttaagaaaataaatgtcaccaggtacttgagaaacccctcgattgtctacctcgatcgtacttccttgctacccacccctcccagggacaaccactgtcctgaatttcacgataattattcctttgcctttcatttctgttttatcacctttgtatgtatctttaaacaacatatacccttttttacttatgtaaatggactgactcatactgcatacatcttctatgacttgattcttttgttcaatattatatctgagattcatccatggtgatgcaaataggtgcattattttttttcactgctctgtagtctggcattgtatgaatacagcacaatgtatcagttttaatattggggatcattagcattattctcaggtttttaaaaattataagcagtactactatgg

SEQ ID NO: 30 - protein, 1545 aa, Homo sapiens [sequence omitted]

SEQ ID NO: 31 - DNA, 5300 bp, Homo sapiens
  CDS (102)..(4739)
aggataattcctgttccactttctttgatgaaacaagtaaagaagaaacaacacaatcatattaatagaagagtcttcgttccagacgcagtccaggaatcatgctggagaagttctgcaactctactttttggaattcctcattcctggacagtccggaggcagacctgccactttgttttgagcaaactgttctggtgtggattcccttgggcttcctatggctcctggccccctggcagcttctccacgtgtataaatccaggaccaagagatcctctaccaccaaactctatcttgctaagcaggtattcgttggttttcttcttattctagcagccatagagctggcccttgtactcacagaagactctggacaagccacagtccctgctgttcgatataccaatccaagcctctacctaggcacatggctcctggttttgctgatccaatacagcagacaatggtgtgtacagaaaaactcctggttcctgtccctattctggattctctcgatactctgtggcactttccaatttcagactctgatccggacactcttacagggtgacaattctaatctagcctactcctgcctgttcttcatctcctacggattccagatcctgatcctgatcttttcagcattttcagaaaataatgagtcatcaaataatccatcatccatagcttcattcctgagtagcattacctacagctggtatgacagcatcattctgaaaggctacaagcgtcctctgacactcgaggatgtctgggaagttgatgaagagatgaaaaccaagacattagtgagcaagtttgaaacgcacatgaagagagagctgcagaaagccaggcgggcactccagagacggcaggagaagagctcccagcagaactctggagccaggctgcctggcttgaacaagaatcagagtcaaagccaagatgcccttgtcctggaagatgttgaaaagaaaaaaaagaagtctgggaccaaaaaagatgttccaaaatcctggttgatgaaggctctgttcaaaactttctacatggtgctcctgaaatcattcctactgaagctagtgaatgacatcttcacgtttgtgagtcctcagctgctgaaattgctgatctcctttgcaagtgaccgtgacacatatttgtggattggatatctctgtgcaatcctcttattcactgcggctctcattcagtctttctgccttcagtgttatttccaactgtgcttcaagctgggtgtaaaagtacggacagctatcatggcttctgtatataagaaggcattgaccctatccaacttggccaggaaggagtacaccgttggagaaacagtgaacctgatgtctgtggatgcccagaagctcatggatgtgaccaacttcatgcacatgctgtggtcaagtgttctacagattgtcttatctatcttcttcctatggagagagttgggaccctcagtcttagcaggtgttggggtgatggtgcttgtaatcccaattaatgcgatactgtccaccaagagtaagaccattcaggtcaaaaatatgaagaataaagacaaacgtttaaagatcatgaatgagattcttagtggaatcaagatcctgaaatattttgcctgggaaccttcattcagagaccaagtacaaaacctccggaagaaagagctcaagaacctgctggcctttagtcaactacagtgtgtagtaatattcgtcttccagttaactccagtcctggtatctgtggtcacattttctgtttatgtcctggtggatagcaacaatattttggatgcacaaaaggccttcacctccattaccctcttcaatatcctgcgctttcccctgagcatgcttcccatgatgatctcctccatgctccaggccagtgtttccacagagcggctagagaagtacttgggaggggatgacttggacacatctgccattcgacatgactgcaattttgacaaagccatgcagttttctgaggcctcctttacctgggaacatgattcggaagccacagtccgagatgtgaacctggacattatggcaggccaacttgtggctgtgataggccctgtcggctctgggaaatcctccttgatatcagccatgctgggagaaatggaaaatgtccacgggcacatcaccatcaagggcaccactgcctatgtcccacagcagtcctggattcagaatggcaccataaaggacaacatcctttttggaacagagtttaatgaaaagaggtaccagcaagtactggaggcctgtgctctcctcccagacttggaaatgctgcctggaggagatttggctgagattggagagaagggtataaatcttagtgggggtcagaagcagcggatcagcctggccagagctacctaccaaaatttagacatctatcttctagatgaccccctgtctgcagtggatgctcatgtaggaaaacatatttttaataaggtcttgggccccaatggcctgttgaaaggcaagactcgactcttggttacacatagcatgcactttcttcctcaagtggatgagattgtagttctggggaatggaacaattgtagagaaaggatcctacagtgctctcctggccaaaaaaggagagtttgctaagaatctgaagacatttctaagacatacaggccctgaagaggaagccacagtccatgatggcagtgaagaagaagacgatgactatgggctgatatccagtgtggaagagatccccgaagatgcagcctccataaccatgagaagagagaacagctttcgtcgaacacttagccgcagttctaggtccaatggcaggcatctgaagtccctgagaaactccttgaaaactcggaatgtgaatagcctgaaggaagacgaagaactagtgaaaggacaaaaactaattaagaaggaattcatagaaactggaaaggtgaagttctccatctacctggagtacctacaagcaataggattgttttcgatattcttcatcatccttgcgtttgtgatgaattctgtggcttttattggatccaacctctggctcagtgcttggaccagtgactctaaaatcttcaatagcaccgactatccagcatctcagagggacatgagagttggagtctacggagctctgggattagcccaaggtatatttgtgttcatagcacatttctggagtgcctttggtttcgtccatgcatcaaatatcttgcacaagcaactgctgaacaatatccttcgagcacctatgagattttttgacacaacacccacaggccggattgtgaacaggtttgccggcgatatttccacagtggatgacaccctgcctcagtccttgcgcagctggattacatgcttcctggggataatcagcacccttgtcatgatctgcatggccactcctgtcttcaccatcatcgtcattcctcttggcattatttatgtatctgttcagatgttttatgtgtctacctcccgccagctgaggcgtctggactctgtcaccaggtccccaatctactctcacttcagcgagaccgtatcaggtttgccagttatccgtgcctttgagcaccagcagcgatttctgaaacacaatgaggagaggattgacaccaaccagaaatgtgtcttttcctggatcacctccaacaggtggcttgcaattcgcctggagctggttgggaacctgactgtcttcttttcagccttgatgatggttatttatagagataccctaagtggggacactgttggctttgttctgtccaatgcactcaatatcacacaaaccctgaactggctggtgaggatgacatcagaaatagagaccaacattgtggctgttgagcgaataactgagtacacaaaagtggaaaatgaggcaccctgggtgactgataagaggcctccgccagattggcccagcaaaggcaagatccagtttaacaactaccaagtgcggtaccgacctgagctggatctggtcctcagagggatcacttgtgacatcggtagcatggagaagattggtgtggtgggcaggacaggagctggaaagtcatccctcacaaactgcctcttcagaatcttagaggctgccggtggtcagattatcattgatggagtagatattgcttccattgggctccacgacctccgagagaagctgaccatcatcccccaggaccccatcctgttctctggaagcctgaggatgaatctcgaccctttcaacaactactcagatgaggagatttggaaggccttggagctggctcacctcaagtcttttgtggccagcctgcaacttgggttatcccacgaagttacagaggctggtggcaacctgagcataggccagaggcagctgctgtgcctgggcagggctctgcttcggaaatccaagatcctggtcctggatgaggccactgctgcggtggatctagaaacagacaacctcattcagacgaccatccaaaacgagttcgcccactgcacagtgatcaccatcgcccacaggctgcataccatcatggacagtgacaaggtaatggtcctagacaacgggaagattatagagtacggcagccctgaagaactgctacaaatccctggacccttttactttatggctaaggaagctggcattgagaatgtgaacagcacaaaattctagcagaaggccccatgggttagaaaaggactataagaataatttcttatttaattttattttttataaaatacagaatacatacaaaagtgtgtataaaatgtacgttttaaaaaaggataagtgaacacccatgaacctactacccaggttaagaaaataaatgtcaccaggtacttgagaaacccctcgattgtctacctcgatcgtacttccttgctacccacccctcccagggacaaccactgtcctgaatttcacgataattattcctttgcctttcatttctgttttatcacctttgtatgtatctttaaacaacatatacccttttttacttatgtaaatggactgactcatactgcatacatcttctatgacttgattcttttgttcaatattatatctgagattcatccatggtgatgcaaataggtgcattattttttttcactgctctgtagtctggcattgtatgaatacagcacaatgtatcagttttaatattggggatcattagcattattctcaggtttttaaaaattataagcagtactactatgg

SEQ ID NO: 32 - protein, 1545 aa, Homo sapiens [sequence omitted]

SEQ ID NO: 33 - DNA, 5300 bp, Homo sapiens; identical to SEQ ID NO: 3
  CDS (102)..(4739)

SEQ ID NO: 34 - protein, 1545 aa, Homo sapiens [sequence omitted]

SEQ ID NO: 35 - DNA, 5300 bp, Homo sapiens
  CDS (102)..(4739)
aggataattcctgttccactttctttgatgaaacaagtaaagaagaaacaacacaatcatattaatagaagagtcttcgttccagacgcagtccaggaatcatgctggagaagttctgcaactctactttttggaattcctcattcctggacagtccggaggcagacctgccactttgttttgagcaaactgttctggtgtggattcccttgggcttcctatggctcctggccccctggcagcttctccacgtgtataaatccaggaccaagagatcctctaccaccaaactctatcttgctaagcaggtattcgttggttttcttcttattctagcagccatagagctggcccttgtactcacagaagactctggacaagccacagtccctgctgttcgatataccaatccaagcctctacctaggcacatggctcctggttttgctgatccaatacagcagacaatggtgtgtacagaaaaactcctggttcctgtccctattctggattctctcgatactctgtggcactttccaatttcagactctgatccggacactcttacagggtgacaattctaatctagcctactcctgcctgttcttcatctcctacggattccagatcctgatcctgatcttttcagcattttcagaaaataatgagtcatcaaataatccatcatccatagcttcattcctgagtagcattacctacagctggtatgacagcatcattctgaaaggctacaagcgtcctctgacactcgaggatgtctgggaagttgatgaagagatgaaaaccaagacattagtgagcaagtttgaaacgcacatgaagagagagctgcagaaagccaggcgggcactccagagacggcaggagaagagctcccagcagaactctggagccaggctgcctggcttgaacaagaatcagagtcaaagccaagatgcccttgtcctggaagatgttgaaaagaaaaaaaagaagtctgggaccaaaaaagatgttccaaaatcctggttgatgaaggctctgttcaaaactttctacatggtgctcctgaaatcattcctactgaagctagtgaatgacatcttcacgtttgtgagtcctcagctgctgaaattgctgatctcctttgcaagtgaccgtgacacatatttgtggattggatatctctgtgcaatcctcttattcactgcggctctcattcagtctttctgccttcagtgttatttccaactgtgcttcaagctgggtgtaaaagtacggacagctatcatggcttctgtatataagaaggcattgaccctatccaacttggccaggaaggagtacaccgttggagaaacagtgaacctgatgtctgtggatgcccagaagctcatggatgtgaccaacttcatgcacatgctgtggtcaagtgttctacagattgtcttatctatcttcttcctatggagagagttgggaccctcagtcttagcaggtgttggggtgatggtgcttgtaatcccaattaatgcgatactgtccaccaagagtaagaccattcaggtcaaaaatatgaagaataaagacaaacgtttaaagatcatgaatgagattcttagtggaatcaagatcctgaaatattttgcctgggaaccttcattcagagaccaagtacaaaacctccggaagaaagagctcaagaacctgctggcctttagtcaactacagtgtgtagtaatattcgtcttccagttaactccagtcctggtatctgtggtcacattttctgtttatgtcctggtggatagcaacaatattttggatgcacaaaaggccttcacctccattaccctcttcaatatcctgcgctttcccctgagcatgcttcccatgatgatctcctccatgctccaggccagtgtttccacagagcggctagagaagtacttgggaggggatgacttggacacatctgccattcgacatgactgcaattttgacaaagccatgcagttttctgaggcctcctttacctgggaacatgattcggaagccacagtccgagatgtgaacctggacattatggcaggccaacttgtggctgtgataggccctgtcggctctgggaaatcctccttgatatcagccatgctgggagaaatggaaaatgtccacgggcacatcaccatcaagggcaccactgcctatgtcccacagcagtcctggattcagaatggcaccataaaggacaacatcctttttggaacagagtttaatgaaaagaggtaccagcaagtactggaggcctgtgctctcctcccagacttggaaatgctgcctggaggagatttggctgagattggagagaagggtataaatcttagtgggggtcagaagcagcggatcagcctggccagagctacctaccaaaatttagacatctatcttctagatgaccccctgtctgcagtggatgctcatgtaggaaaacatatttttaataaggtcttgggccccaatggcctgttgaaaggcaagactcgactcttggttacacatagcatgcactttcttcctcaagtggatgagattgtagttctggggaatggaacaattgtagagaaaggatcctacagtgctctcctggccaaaaaaggagagtttgctaagaatctgaagacatttctaagacatacaggccctgaagaggaagccacagtccatgatggcagtgaagaagaagacgatgactatgggctgatatccagtgtggaagagatccccgaagatgcagcctccataaccatgagaagagagaacagctttcgtcgaacacttagccgcagttctaggtccaatggcaggcatctgaagtccctgagaaactccttgaaaactcggaatgtgaatagcctgaaggaagacgaagaactagtgaaaggacaaaaactaattaagaaggaattcatagaaactggaaaggtgaagttctccatctacctggagtacctacaagcaataggattgttttcgatattcttcatcatccttgcgtttgtgatgaattctgtggcttttattggatccaacctctggctcagtgcttggaccagtgactctaaaatcttcaatagcaccgactatccagcatctcagagggacatgagagttggagtctacggagctctgggattagcccaaggtatatttgtgttcatagcacatttctggagtgcctttggtttcgtccatgcatcaaatatcttgcacaagcaactgctgaacaatatccttcgagcacctatgagattttttgacacaacacccacaggccggattgtgaacaggtttgccggcgatatttccacagtggatgacaccctgcctcagtccttgcgcagctggattacatgcttcctggggataatcagcacccttgtcatgatctgcatggccactcctgtcttcaccatcatcgtcattcctcttggcattatttatgtatctgttcagatgttttatgtgtctacctcccgccagctgaggcgtctggactctgtcaccaggtccccaatctactctcacttcagcgagaccgtatcaggtttgccagttatccgtgcctttgagcaccagcagctatttctgaaacacaatgaggagaggattgacaccaaccagaaatgtgtcttttcctggatcacctccaacaggtggcttgcaattcgcctggagctggttgggaacctgactgtcttcttttcagccttgatgatggttatttatagagataccctaagtggggacactgttggctttgttctgtccaatgcactcaatatcacacaaaccctgaactggctggtgaggatgacatcagaaatagagaccaacattgtggctgttgagcgaataactgagtacacaaaagtggaaaatgaggcaccctgggtgactgataagaggcctccgccagattggcccagcaaaggcaagatccagtttaacaactaccaagtgcggtaccgacctgagctggatctggtcctcagagggatcacttgtgacatcggtagcatggagaagattggtgtggtgggcaggacaggagctggaaagtcatccctcacaaactgcctcttcagaatcttagaggctgccggtggtcagattatcattgatggagtagatattgcttccattgggctccacgacctccgagagaagctgaccatcatcccccaggaccccatcctgttctctggaagcctgaggatgaatctcgaccctttcaacaactactcagatgaggagatttggaaggccttggagctggctcacctcaagtcttttgtggccagcctgcaacttgggttatcccacgaagttacagaggctggtggcaacctgagcataggccagaggcagctgctgtgcctgggcagggctctgcttcggaaatccaagatcctggtcctggatgaggccactgctgcggtggatctagagacagacaacctcattcagacgaccatccaaaacgagttcgcccactgcacagtgatcaccatcgcccacaggctgcataccatcatggacagtgacaaggtaatggtcctagacaacgggaagattatagagtacggcagccctgaagaactgctacaaatccctggacccttttactttatggctaaggaagctggcattgagaatgtgaacagcacaaaattctagcagaaggccccatgggttagaaaaggactataagaataatttcttatttaattttattttttataaaatacagaatacatacaaaagtgtgtataaaatgtacgttttaaaaaaggataagtgaacacccatgaacctactacccaggttaagaaaataaatgtcaccaggtacttgagaaacccctcgattgtctacctcgatcgtacttccttgctacccacccctcccagggacaaccactgtcctgaatttcacgataattattcctttgcctttcatttctgttttatcacctttgtatgtatctttaaacaacatatacccttttttacttatgtaaatggactgactcatactgcatacatcttctatgacttgattcttttgttcaatattatatctgagattcatccatggtgatgcaaataggtgcattattttttttcactgctctgtagtctggcattgtatgaatacagcacaatgtatcagttttaatattggggatcattagcattattctcaggtttttaaaaattataagcagtactactatgg

SEQ ID NO: 36 - protein, 1545 aa, Homo sapiens
MLEKFCNSTFWNSSFLDSPEADLPLCFEQTVLVWIPLGFLWLLAPWQLLHVYKSRTKRSSTTKLYLAKQVFVGFLLILAAIELALVLTEDSGQATVPAVRYTNPSLYLGTWLLVLLIQYSRQWCVQKNSWFLSLFWILSILCGTFQFQTLIRTLLQGDNSNLAYSCLFFISYGFQILILIFSAFSENNESSNNPSSIASFLSSITYSWYDSIILKGYKRPLTLEDVWEVDEEMKTKTLVSKFETHMKRELQKARRALQRRQEKSSQQNSGARLPGLNKNQSQSQDALVLEDVEKKKKKSGTKKDVPKSWLMKALFKTFYMVLLKSFLLKLVNDIFTFVSPQLLKLLISFASDRDTYLWIGYLCAILLFTAALIQSFCLQCYFQLCFKLGVKVRTAIMASVYKKALTLSNLARKEYTVGETVNLMSVDAQKLMDVTNFMHMLWSSVLQIVLSIFFLWRELGPSVLAGVGVMVLVIPINAILSTKSKTIQVKNMKNKDKRLKIMNEILSGIKILKYFAWEPSFRDQVQNLRKKELKNLLAFSQLQCVVIFVFQLTPVLVSVVTFSVYVLVDSNNILDAQKAFTSITLFNILRFPLSMLPMMISSMLQASVSTERLEKYLGGDDLDTSAIRHDCNFDKAMQFSEASFTWEHDSEATVRDVNLDIMAGQLVAVIGPVGSGKSSLISAMLGEMENVHGHITIKGTTAYVPQQSWIQNGTIKDNILFGTEFNEKRYQQVLEACALLPDLEMLPGGDLAEIGEKGINLSGGQKQRISLARATYQNLDIYLLDDPLSAVDAHVGKHIFNKVLGPNGLLKGKTRLLVTHSMHFLPQVDEIVVLGNGTIVEKGSYSALLAKKGEFAKNLKTFLRHTGPEEEATVHDGSEEEDDDYGLISSVEEIPEDAASITMRRENSFRRTLSRSSRSNGRHLKSLRNSLKTRNVNSLKEDEELVKGQKLIKKEFIETGKVKFSIYLEYLQAIGLFSIFFIILAFVMNSVAFIGSNLWLSAWTSDSKIFNSTDYPASQRDMRVGVYGALGLAQGIFVFIAHFWSAFGFVHASNILHKQLLNNILRAPMRFFDTTPTGRIVNRFAGDISTVDDTLPQSLRSWITCFLGIISTLVMICMATPVFTIIVIPLGIIYVSVQMFYVSTSRQLRRLDSVTRSPIYSHFSETVSGLPVIRAFEHQQLFLKHNEERIDTNQKCVFSWITSNRWLAIRLELVGNLTVFFSALMMVIYRDTLSGDTVGFVLSNALNITQTLNWLVRMTSEIETNIVAVERITEYTKVENEAPWVTDKRPPPDWPSKGKIQFNNYQVRYRPELDLVLRGITCDIGSMEKIGVVGRTGAGKSSLTNCLFRILEAAGGQIIIDGVDIASIGLHDLREKLTIIPQDPILFSGSLRMNLDPFNNYSDEEIWKALELAHLKSFVASLQLGLSHEVTEAGGNLSIGQRQLLCLGRALLRKSKILVLDEATAAVDLETDNLIQTTIQNEFAHCTVITIAHRLHTIMDSDKVMVLDNGKIIEYGSPEELLQIPGPFYFMAKEAGIENVNSTKF

SEQ ID NO: 37 - DNA, 5300 bp, Homo sapiens
  CDS (102)..(4739)
aggataattcctgttccactttctttgatgaaacaagtaaagaagaaacaacacaatcatattaatagaagagtcttcgttccagacgcagtccaggaatcatgctggagaagttctgcaactctactttttggaattcctcattcctggacagtccggaggcagacctgccactttgttttgagcaaactgttctggtgtggattcccttgggcttcctatggctcctggccccctggcagcttctccacgtgtataaatccaggaccaagagatcctctaccaccaaactctatcttgctaagcaggtattcgttggttttcttcttattctagcagccatagagctggcccttgtactcacagaagactctggacaagccacagtccctgctgttcgatataccaatccaagcctctacctaggcacatggctcctggttttgctgatccaatacagcagacaatggtgtgtacagaaaaactcctggttcctgtccctattctggattctctcgatactctgtggcactttccaatttcagactctgatccggacactcttacagggtgacaattctaatctagcctactcctgcctgttcttcatctcctacggattccagatcctgatcctgatcttttcagcattttcagaaaataatgagtcatcaaataatccatcatccatagcttcattcctgagtagcattacctacagctggtatgacagcatcattctgaaaggctacaagcgtcctctgacactcgaggatgtctgggaagttgatgaagagatgaaaaccaagacattagtgagcaagtttgaaacgcacatgaagagagagctgcagaaagccaggcgggcactccagagacggcaggagaagagctcccagcagaactctggagccaggctgcctggcttgaacaagaatcagagtcaaagccaagatgcccttgtcctggaagatgttgaaaagaaaaaaaagaagtctgggaccaaaaaagatgttccaaaatcctggttgatgaaggctctgttcaaaactttctacatggtgctcctgaaatcattcctactgaagctagtgaatgacatcttcacgtttgtgagtcctcagctgctgaaattgctgatctcctttgcaagtgaccgtgacacatatttgtggattggatatctctgtgcaatcctcttattcactgcggctctcattcagtctttctgccttcagtgttatttccaactgtgcttcaagctgggtgtaaaagtacggacagctatcatggcttctgtatataagaaggcattgaccctatccaacttggccaggaaggagtacaccgttggagaaacagtgaacctgatgtctgtggatgcccagaagctcatggatgtgaccaacttcatgcacatgctgtggtcaagtgttctacagattgtcttatctatcttcttcctatggagagagttgggaccctcagtcttagcaggtgttggggtgatggtgcttgtaatcccaattaatgcgatactgtccaccaagagtaagaccattcaggtcaaaaatatgaagaataaagacaaacgtttaaagatcatgaatgagattcttagtggaatcaagatcctgaaatattttgcctgggaaccttcattcagagaccaagtacaaaacctccggaagaaagagctcaagaacctgctggcctttagtcaactacagtgtgtagtaatattcgtcttccagttaactccagtcctggtatctgtggtcacattttctgtttatgtcctggtggatagcaacaatattttggatgcacaaaaggccttcacctccattaccctcttcaatatcctgcgctttcccctgagcatgcttcccatgatgatctcctccatgctccaggccagtgtttccacagagcggctagagaagtacttgggaggggatgacttggacacatctgccattcgacatgactgcaattttgacaaagccatgcagttttctgaggcctcctttacctgggaacatgattcggaagccacagtccgagatgtgaacctggacattatggcaggccaacttgtggctgtgataggccctgtcggctctgggaaatcctccttgatatcagccatgctgggagaaatggaaaatgtccacgggcacatcaccatcaagggcaccactgcctatgtcccacagcagtcctggattcagaatggcaccataaaggacaacatcctttttggaacagagtttaatgaaaagaggtaccagcaagtactggaggcctgtgctctcctcccagacttggaaatgctgcctggaggagatttggctgagattggagagaagggtataaatcttagtgggggtcagaagcagcggatcagcctggccagagctacctaccaaaatttagacatctatcttctagatgaccccctgtctgcagtggatgctcatgtaggaaaacatatttttaataaggtcttgggccccaatggcctgttgaaaggcaagactcgactcttggttacacatagcatgcactttcttcctcaagtggatgagattgtagttctggggaatggaacaattgtagagaaaggatcctacagtgctctcctggccaaaaaaggagagtttgctaagaatctgaagacatttctaagacatacaggccctgaagaggaagccacagtccatgatggcagtgaagaagaagacgatgactatgggctgatatccagtgtggaagagatccccgaagatgcagcctccataaccatgagaagagagaacagctttcgtcgaacacttagccgcagttctaggtccaatggcaggcatctgaagtccctgagaaactccttgaaaactcggaatgtgaatagcctgaaggaagacgaagaactagtgaaaggacaaaaactaattaagaaggaattcatagaaactggaagggtgaagttctccatctacctggagtacctacaagcaataggattgttttcgatattcttcatcatccttgcgtttgtgatgaattctgtggcttttattggatccaacctctggctcagtgcttggaccagtgactctaaaatcttcaatagcaccgactatccagcatctcagagggacatgagagttggagtctacggagctctgggattagcccaaggtatatttgtgttcatagcacatttctggagtgcctttggtttcgtccatgcatcaaatatcttgcacaagcaactgctgaacaatatccttcgagcacctatgagattttttgacacaacacccacaggccggattgtgaacaggtttgccggcgatatttccacagtggatgacaccctgcctcagtccttgcgcagctggattacatgcttcctggggataatcagcacccttgtcatgatctgcatggccactcctgtcttcaccatcatcgtcattcctcttggcattatttatgtatctgttcagatgttttatgtgtctacctcccgccagctgaggcgtctggactctgtcaccaggtccccaatctactctcacttcagcgagaccgtatcaggtttgccagttatccgtgcctttgagcaccagcagcgatttctgaaacacaatgaggagaggattgacaccaaccagaaatgtgtcttttcctggatcacctccaacaggtggcttgcaattcgcctggagctggttgggaacctgactgtcttcttttcagccttgatgatggttatttatagagataccctaagtggggacactgttggctttgttctgtccaatgcactcaatatcacacaaaccctgaactggctggtgaggatgacatcagaaatagagaccaacattgtggctgttgagcgaataactgagtacacaaaagtggaaaatgaggcaccctgggtgactgataagaggcctccgccagattggcccagcaaaggcaagatccagtttaacaactaccaagtgcggtaccgacctgagctggatctggtcctcagagggatcacttgtgacatcggtagcatggagaagattggtgtggtgggcaggacaggagctggaaagtcatccctcacaaactgcctcttcagaatcttagaggctgccggtggtcagattatcattgatggagtagatattgcttccattgggctccacgacctccgagagaagctgaccatcatcccccaggaccccatcctgttctctggaagcctgaggatgaatctcgaccctttcaacaactactcagatgaggagatttggaaggccttggagctggctcacctcaagtcttttgtggccagcctgcaacttgggttatcccacgaagttacagaggctggtggcaacctgagcataggccagaggcagctgctgtgcctgggcagggctctgcttcggaaatccaagatcctggtcctggatgaggccactgctgcggtggatctagagacagacaacctcattcagacgaccatccaaaacgagttcgcccactgcacagtgatcaccatcgcccacaggctgcataccatcatggacagtgacaaggtaatggtcctagacaacgggaagattatagagtacggcagccctgaagaactgctacaaatccctggacccttttactttatggctaaggaagctggcattgagaatgtgaacagcacaaaattctagcagaaggccccatgggttagaaaaggactataagaataatttcttatttaattttattttttataaaatacagaatacatacaaaagtgtgtataaaatgtacgttttaaaaaaggataagtgaacacccatgaacctactacccaggttaagaaaataaatgtcaccaggtacttgagaaacccctcgattgtctacctcgatcgtacttccttgctacccacccctcccagggacaaccactgtcctgaatttcacgataattattcctttgcctttcatttctgttttatcacctttgtatgtatctttaaacaacatatacccttttttacttatgtaaatggactgactcatactgcatacatcttctatgacttgattcttttgttcaatattatatctgagattcatccatggtgatgcaaataggtgcattattttttttcactgctctgtagtctggcattgtatgaatacagcacaatgtatcagttttaatattggggatcattagcattattctcaggtttttaaaaattataagcagtactactatgg

SEQ ID NO: 38 - protein, 1545 aa, Homo sapiens
MLEKFCNSTFWNSSFLDSPEADLPLCFEQTVLVWIPLGFLWLLAPWQLLHVYKSRTKRSSTTKLYLAKQVFVGFLLILAAIELALVLTEDSGQATVPAVRYTNPSLYLGTWLLVLLIQYSRQWCVQKNSWFLSLFWILSILCGTFQFQTLIRTLLQGDNSNLAYSCLFFISYGFQILILIFSAFSENNESSNNPSSIASFLSSITYSWYDSIILKGYKRPLTLEDVWEVDEEMKTKTLVSKFETHMKRELQKARRALQRRQEKSSQQNSGARLPGLNKNQSQSQDALVLEDVEKKKKKSGTKKDVPKSWLMKALFKTFYMVLLKSFLLKLVNDIFTFVSPQLLKLLISFASDRDTYLWIGYLCAILLFTAALIQSFCLQCYFQLCFKLGVKVRTAIMASVYKKALTLSNLARKEYTVGETVNLMSVDAQKLMDVTNFMHMLWSSVLQIVLSIFFLWRELGPSVLAGVGVMVLVIPINAILSTKSKTIQVKNMKNKDKRLKIMNEILSGIKILKYFAWEPSFRDQVQNLRKKELKNLLAFSQLQCVVIFVFQLTPVLVSVVTFSVYVLVDSNNILDAQKAFTSITLFNILRFPLSMLPMMISSMLQASVSTERLEKYLGGDDLDTSAIRHDCNFDKAMQFSEASFTWEHDSEATVRDVNLDIMAGQLVAVIGPVGSGKSSLISAMLGEMENVHGHITIKGTTAYVPQQSWIQNGTIKDNILFGTEFNEKRYQQVLEACALLPDLEMLPGGDLAEIGEKGINLSGGQKQRISLARATYQNLDIYLLDDPLSAVDAHVGKHIFNKVLGPNGLLKGKTRLLVTHSMHFLPQVDEIVVLGNGTIVEKGSYSALLAKKGEFAKNLKTFLRHTGPEEEATVHDGSEEEDDDYGLISSVEEIPEDAASITMRRENSFRRTLSRSSRSNGRHLKSLRNSLKTRNVNSLKEDEELVKGQKLIKKEFIETGRVKFSIYLEYLQAIGLFSIFFIILAFVMNSVAFIGSNLWLSAWTSDSKIFNSTDYPASQRDMRVGVYGALGLAQGIFVFIAHFWSAFGFVHASNILHKQLLNNILRAPMRFFDTTPTGRIVNRFAGDISTVDDTLPQSLRSWITCFLGIISTLVMICMATPVFTIIVIPLGIIYVSVQMFYVSTSRQLRRLDSVTRSPIYSHFSETVSGLPVIRAFEHQQRFLKHNEERIDTNQKCVFSWITSNRWLAIRLELVGNLTVFFSALMMVIYRDTLSGDTVGFVLSNALNITQTLNWLVRMTSEIETNIVAVERITEYTKVENEAPWVTDKRPPPDWPSKGKIQFNNYQVRYRPELDLVLRGITCDIGSMEKIGVVGRTGAGKSSLTNCLFRILEAAGGQIIIDGVDIASIGLHDLREKLTIIPQDPILFSGSLRMNLDPFNNYSDEEIWKALELAHLKSFVASLQLGLSHEVTEAGGNLSIGQRQLLCLGRALLRKSKILVLDEATAAVDLETDNLIQTTIQNEFAHCTVITIAHRLHTIMDSDKVMVLDNGKIIEYGSPEELLQIPGPFYFMAKEAGIENVNSTKF

SEQ ID NO: 39 - DNA, 5300 bp, Homo sapiens
  CDS (102)..(4739)
aggataattcctgttccactttctttgatgaaacaagtaaagaagaaacaacacaatcatattaatagaagagtcttcgttccagacgcagtccaggaatcatgctggagaagttctgcaactctactttttggaattcctcattcctggacagtccggaggcagacctgccactttgttttgagcaaactgttctggtgtggattcccttgggcttcctatggctcctggccccctggcagcttctccacgtgtataaatccaggaccaagagatcctctaccaccaaactctatcttgctaagcaggtattcgttggttttcttcttattctagcagccatagagctggcccttgtgctcacagaagactctggacaagccacagtccctgctgttcgatataccaatccaagcctctacctaggcacatggctcctggttttgctgatccaatacagcagacaatggtgtgtacagaaaaactcctggttcctgtccctattctggattctctcgatactctgtggcactttccaatttcagactctgatccggacactcttacagggtgacaattctaatctagcctactcctgcctgttcttcatctcctacggattccagatcctgatcctgatcttttcagcattttcagaaaataatgagtcatcaaataatccatcatccatagcttcattcctgagtagcattacctacagctggtatgacagcatcattctgaaaggctacaagcgtcctctgacactcgaggatgtctgggaagttgatgaagagatgaaaaccaagacattagtgagcaagtttgaaacgcacatgaagagagagctgcagaaagccaggcgggcactccagagacggcaggagaagagctcccagcagaactctggagccaggctgcctggcttgaacaagaatcagagtcaaagccaagatgcccttgtcctggaagatgttgaaaagaaaaaaaagaagtctgggaccaaaaaagatgttccaaaatcctggttgatgaaggctctgttcaaaactttctacatggtgctcctgaaatcattcctactgaagctagtgaatgacatcttcacgtttgtgagtcctcagctgctgaaattgctgatctcctttgcaagtgaccgtgacacatatttgtggattggatatctctgtgcaatcctcttattcactgcggctctcattcagtctttctgccttcagtgttatttccaactgtgcttcaagctgggtgtaaaagtacggacagctatcatggcttctgtatataagaaggcattgaccctatccaacttggccaggaaggagtacaccgttggagaaacagtgaacctgatgtctgtggatgcccagaagctcatggatgtgaccaacttcatgcacatgctgtggtcaagtgttctacagattgtcttatctatcttcttcctatggagagagttgggaccctcagtcttagcaggtgttggggtgatggtgcttgtaatcccaattaatgcgatactgtccaccaagagtaagaccattcaggtcaaaaatatgaagaataaagacaaacgtttaaagatcatgaatgagattcttagtggaatcaagatcctgaaatattttgcctgggaaccttcattcagagaccaagtacaaaacctccggaagaaagagctcaagaacctgctggcctttagtcaactacagtgtgtagtaatattcgtcttccagttaactccagtcctggtatctgtggtcacattttctgtttatgtcctggtggatagcaacaatattttggatgcacaaaaggccttcacctccattaccctcttcaatatcctgcgctttcccctgagcatgcttcccatgatgatctcctccatgctccaggccagtgtttccacagagcggctagagaagtacttgggaggggatgacttggacacatctgccattcgacatgactgcaattttgacaaagccatgcagttttctgaggcctcctttacctgggaacatgattcggaagccacagtccgagatgtgaacctggacattatggcaggccaacttgtggctgtgataggccctgtcggctctgggaaatcctccttgatatcagccatgctgggagaaatggaaaatgtccacgggcacatcaccatcaagggcaccactgcctatgtcccacagcagtcctggattcagaatggcaccataaaggacaacatcctttttggaacagagtttaatgaaaagaggtaccagcaagtactggaggcctgtgctctcctcccagacttggaaatgctgcctggaggagatttggctgagattggagagaagggtataaatcttagtgggggtcagaagcagcggatcagcctggccagagctacctaccaaaatttagacatctatcttctagatgaccccctgtctgcagtggatgctcatgtaggaaaacatatttttaataaggtcttgggccccaatggcctgttgaaaggcaagactcgactcttggttacacatagcatgcactttcttcctcaagtggatgagattgtagttctggggaatggaacaattgtagagaaaggatcctacagtgctctcctggccaaaaaaggagagtttgctaagaatctgaagacatttctaagacatacaggccctgaagaggaagccacagtccatgatggcagtgaagaagaagacgatgactatgggctgatatccagtgtggaagagatccccgaagatgcagcctccataaccatgagaagagagaacagctttcgtcgaacacttagccgcagttctaggtccaatggcaggcatctgaagtccctgagaaactccttgaaaactcggaatgtgaatagcctgaaggaagacgaagaactagtgaaaggacaaaaactaattaagaaggaattcatagaaactggaaaggtgaagttctccatctacctggagtacctacaagcaataggattgttttcgatattcttcatcatccttgcgtttgtgatgaattctgtggcttttattggatccaacctctggctcagtgcttggaccagtgactctaaaatcttcaatagcaccgactatccagcatctcagagggacatgagagttggagtctacggagctctgggattagcccaaggtatatttgtgttcatagcacatttctggagtgcctttggtttcgtccatgcatcaaatatcttgcacaagcaactgctgaacaatatccttcgagcacctatgagattttttgacacaacacccacaggccggattgtgaacaggtttgccggcgatatttccacagtggatgacaccctgcctcagtccttgcgcagctggattacatgcttcctggggataatcagcacccttgtcatgatctgcatggccactcctgtcttcaccatcatcgtcattcctcttggcattatttatgtatctgttcagatgttttatgtgtctacctcccgccagctgaggcgtctggactctgtcaccaggtccccaatctactctcacttcagcgagaccgtatcaggtttgccagttatccgtgcctttgagcaccagcagcgatttctgaaacacaatgaggagaggattgacaccaaccagaaatgtgtcttttcctggatcacctccaacaggtggcttgcaattcgcctggagctggttgggaacctgactgtcttcttttcagccttgatgatggttatttatagagataccctaagtggggacactgttggctttgttctgtccaatgcactcaatatcacacaaaccctgaactggctggtgaggatgacatcagaaatagagaccaacattgtggctgttgagcgaataactgagtacacaaaagtggaaaatgaggcaccctgggtgactgataagaggcctccgccagattggcccagcaaaggcaagatccagtttaacaactaccaagtgcggtaccgacctgagctggatctggtcctcagagggatcacttgtgacatcggtagcatggagaagattggtgtggtgggcaggacaggagctggaaagtcatccctcacaaactgcctcttcagaatcttagaggctgccggtggtcagattatcattgatggagtagatattgcttccattgggctccacgacctccgagagaagctgaccatcatcccccaggaccccatcctgttctctggaagcctgaggatgaatctcgaccctttcaacaactactcagatgaggagatttggaaggccttggagctggctcacctcaagtcttttgtggccagcctgcaacttgggttatcccacgaagttacagaggctggtggcaacctgagcataggccagaggcagctgctgtgcctgggcagggctctgcttcggaaatccaagatcctggtcctggatgaggccactgctgcggtggatctagagacagacaacctcattcagacgaccatccaaaacgagttcgcccactgcacagtgatcaccatcgcccacaggctgcataccatcatggacagtgacaaggtaatggtcctagacaacgggaagattatagagtacggcagccctgaagaactgctacaaatccctggacccttttactttatggctaaggaagctggcattgagaatgtgaacagcacaaaattctagcagaaggccccatgggttagaaaaggactataagaataatttcttatttaattttattttttataaaatacagaatacatacaaaagtgtgtataaaatgtacgttttaaaaaaggataagtgaacacccatgaacctactacccaggttaagaaaataaatgtcaccaggtacttgagaaacccctcgattgtctacctcgatcgtacttccttgctacccacccctcccagggacaaccactgtcctgaatttcacgataattattcctttgcctttcatttctgttttatcacctttgtatgtatctttaaacaacatatacccttttttacttatgtaaatggactgactcatactgcatacatcttctatgacttgattcttttgttcaatattatatctgagattcatccatggtgatgcaaataggtgcattattttttttcactgctctgtagtctggcattgtatgaatacagcacaatgtatcagttttaatattggggatcattagcattattctcaggtttttaaaaattataagcagtactactatgg

SEQ ID NO: 40 - protein, 1545 aa, Homo sapiens [sequence omitted]

SEQ ID NO: 41 - DNA, 5300 bp, Homo sapiens
  CDS (102)..(4739)
aggataattcctgttccactttctttgatgaaacaagtaaagaagaaacaacacaatcatattaatagaagagtcttcgttccagacgcagtccaggaatcatgctggagaagttctgcaactctactttttggaattcctcattcctggacagtccggaggcagacctgccactttgttttgagcaaactgttctggtgtggattcccttgggcttcctatggctcctggccccctggcagcttctccacgtgtataaatccaggaccaagagatcctctaccaccaaactctatcttgctaagcaggtattcgttggttttcttcttattctagcagccatagagctggcccttgtactcacagaagactctggacaagccacagtccctgctgttcgatataccaatccaagcctctacctaggcacatggctcctggttttgctgatccaatacagcagacaatggtgtgtacagaaaaactcctggttcctgtccctattctggattctctcgatactctgtggcactttccaatttcagactctgatccggacactcttacagggtgacaattctaatctagcctactcctgcctgttcttcatctcctacggattccagatcctgatcctgatcttttcagcattttcagaaaataatgagtcatcaaataatccatcatccatagcttcattcctgagtagcattacctacagctggtatgacagcatcattctgaaaggctacaagcgtcctctgacactcgaggatgtctgggaagttgatgaagagatgaaaaccaagacattagtgagcaagtttgaaacgcacatgaagagagagctgcagaaagccaggcgggcactccagagacggcaggagaagagctcccagcagaactctggagccaggctgcctggcttgaacaagaatcagagtcaaagccaagatgcccttgtcctggaagatgttgaaaagaaaaaaaagaagtctgggaccaaaaaagatgttccaaaatcctggttgatgaaggctctgttcaaaactttctacatggtgctcctgaaatcattcctactgaagctagtgaatgacatcttcacgtttgtgagtcctcagctgctgaaattgctgatctcctttgcaagtgaccgtgacacatatttgtggattggatatctctgtgcaatcctcttattcactgcggctctcattcagtctttctgccttcagtgttatttccaactgtgcttcaagctgggtgtaaaagtacggacagctatcatggcttctgtatataagaaggcattgaccctatccaacttggccaggaaggagtacaccgttggagaaacagtgaacctgatgtctgtggatgcccagaagctcatggatgtgaccaacttcatgcacatgctgtggtcaagtgttctacagattgtcttatctatcttcttcctatggagagagttgggaccctcagtcttagcaggtgttggggtgatggtgcttgtaatcccaattaatgcgatactgtccaccaagagtaagaccattcaggtcaaaaatatgaagaataaagacaaacgtttaaagatcatgaatgagattcttagtggaatcaagatcctgaaatattttgcctgggaaccttcattcagagaccaagtacaaaacctccggaagaaagagctcaagaacctgctggcctttagtcaactacagtgtgtagtaatattcgtcttccagttaactccagtcctggtatctgtggtcacattttctgtttatgtcctggtggatagcaacaatattttggatgcacaaaaggccttcacctccattaccctcttcaatatcctgcgctttcccctgagcatgcttcccatgatgatctcctccatgctccaggccagtgtttccacagagcggctagagaagtacttgggaggggatgacttggacacatctgccattcgacatgactgcaattttgacaaagccatgcagttttctgaggcctcctttacctgggaacatgattcggaagccacagtccgagatgtgaacctggacattatggcaggccaacttgtggctgtgacaggccctgtcggctctgggaaatcctccttgatatcagccatgctgggagaaatggaaaatgtccacgggcacatcaccatcaagggcaccactgcctatgtcccacagcagtcctggattcagaatggcaccataaaggacaacatcctttttggaacagagtttaatgaaaagaggtaccagcaagtactggaggcctgtgctctcctcccagacttggaaatgctgcctggaggagatttggctgagattggagagaagggtataaatcttagtgggggtcagaagcagcggatcagcctggccagagctacctaccaaaatttagacatctatcttctagatgaccccctgtctgcagtggatgctcatgtaggaaaacatatttttaataaggtcttgggccccaatggcctgttgaaaggcaagactcgactcttggttacacatagcatgcactttcttcctcaagtggatgagattgtagttctggggaatggaacaattgtagagaaaggatcctacagtgctctcctggccaaaaaaggagagtttgctaagaatctgaagacatttctaagacatacaggccctgaagaggaagccacagtccatgatggcagtgaagaagaagacgatgactatgggctgatatccagtgtggaagagatccccgaagatgcagcctccataaccatgagaagagagaacagctttcgtcgaacacttagccgcagttctaggtccaatggcaggcatctgaagtccctgagaaactccttgaaaactcggaatgtgaatagcctgaaggaagacgaagaactagtgaaaggacaaaaactaattaagaaggaattcatagaaactggaaaggtgaagttctccatctacctggagtacctacaagcaataggattgttttcgatattcttcatcatccttgcgtttgtgatgaattctgtggcttttattggatccaacctctggctcagtgcttggaccagtgactctaaaatcttcaatagcaccgactatccagcatctcagagggacatgagagttggagtctacggagctctgggattagcccaaggtatatttgtgttcatagcacatttctggagtgcctttggtttcgtccatgcatcaaatatcttgcacaagcaactgctgaacaatatccttcgagcacctatgagattttttgacacaacacccacaggccggattgtgaacaggtttgccggcgatatttccacagtggatgacaccctgcctcagtccttgcgcagctggattacatgcttcctggggataatcagcacccttgtcatgatctgcatggccactcctgtcttcaccatcatcgtcattcctcttggcattatttatgtatctgttcagatgttttatgtgtctacctcccgccagctgaggcgtctggactctgtcaccaggtccccaatctactctcacttcagcgagaccgtatcaggtttgccagttatccgtgcctttgagcaccagcagcgatttctgaaacacaatgaggagaggattgacaccaaccagaaatgtgtcttttcctggatcacctccaacaggtggcttgcaattcgcctggagctggttgggaacctgactgtcttcttttcagccttgatgatggttatttatagagataccctaagtggggacactgttggctttgttctgtccaatgcactcaatatcacacaaaccctgaactggctggtgaggatgacatcagaaatagagaccaacattgtggctgttgagcgaataactgagtacacaaaagtggaaaatgaggcaccctgggtgactgataagaggcctccgccagattggcccagcaaaggcaagatccagtttaacaactaccaagtgcggtaccgacctgagctggatctggtcctcagagggatcacttgtgacatcggtagcatggagaagattggtgtggtgggcaggacaggagctggaaagtcatccctcacaaactgcctcttcagaatcttagaggctgccggtggtcagattatcattgatggagtagatattgcttccattgggctccacgacctccgagagaagctgaccatcatcccccaggaccccatcctgttctctggaagcctgaggatgaatctcgaccctttcaacaactactcagatgaggagatttggaaggccttggagctggctcacctcaagtcttttgtggccagcctgcaacttgggttatcccacgaagttacagaggctggtggcaacctgagcataggccagaggcagctgctgtgcctgggcagggctctgcttcggaaatccaagatcctggtcctggatgaggccactgctgcggtggatctagagacagacaacctcattcagacgaccatccaaaacgagttcgcccactgcacagtgatcaccatcgcccacaggctgcataccatcatggacagtgacaaggtaatggtcctagacaacgggaagattatagagtacggcagccctgaagaactgctacaaatccctggacccttttactttatggctaaggaagctggcattgagaatgtgaacagcacaaaattctagcagaaggccccatgggttagaaaaggactataagaataatttcttatttaattttattttttataaaatacagaatacatacaaaagtgtgtataaaatgtacgttttaaaaaaggataagtgaacacccatgaacctactacccaggttaagaaaataaatgtcaccaggtacttgagaaacccctcgattgtctacctcgatcgtacttccttgctacccacccctcccagggacaaccactgtcctgaatttcacgataattattcctttgcctttcatttctgttttatcacctttgtatgtatctttaaacaacatatacccttttttacttatgtaaatggactgactcatactgcatacatcttctatgacttgattcttttgttcaatattatatctgagattcatccatggtgatgcaaataggtgcattattttttttcactgctctgtagtctggcattgtatgaatacagcacaatgtatcagttttaatattggggatcattagcattattctcaggtttttaaaaattataagcagtactactatgg

SEQ ID NO: 42 - protein, 1545 aa, Homo sapiens
MLEKFCNSTFWNSSFLDSPEADLPLCFEQTVLVWIPLGFLWLLAPWQLLHVYKSRTKRSSTTKLYLAKQVFVGFLLILAAIELALVLTEDSGQATVPAVRYTNPSLYLGTWLLVLLIQYSRQWCVQKNSWFLSLFWILSILCGTFQFQTLIRTLLQGDNSNLAYSCLFFISYGFQILILIFSAFSENNESSNNPSSIASFLSSITYSWYDSIILKGYKRPLTLEDVWEVDEEMKTKTLVSKFETHMKRELQKARRALQRRQEKSSQQNSGARLPGLNKNQSQSQDALVLEDVEKKKKKSGTKKDVPKSWLMKALFKTFYMVLLKSFLLKLVNDIFTFVSPQLLKLLISFASDRDTYLWIGYLCAILLFTAALIQSFCLQCYFQLCFKLGVKVRTAIMASVYKKALTLSNLARKEYTVGETVNLMSVDAQKLMDVTNFMHMLWSSVLQIVLSIFFLWRELGPSVLAGVGVMVLVIPINAILSTKSKTIQVKNMKNKDKRLKIMNEILSGIKILKYFAWEPSFRDQVQNLRKKELKNLLAFSQLQCVVIFVFQLTPVLVSVVTFSVYVLVDSNNILDAQKAFTSITLFNILRFPLSMLPMMISSMLQASVSTERLEKYLGGDDLDTSAIRHDCNFDKAMQFSEASFTWEHDSEATVRDVNLDIMAGQLVAVTGPVGSGKSSLISAMLGEMENVHGHITIKGTTAYVPQQSWIQNGTIKDNILFGTEFNEKRYQQVLEACALLPDLEMLPGGDLAEIGEKGINLSGGQKQRISLARATYQNLDIYLLDDPLSAVDAHVGKHIFNKVLGPNGLLKGKTRLLVTHSMHFLPQVDEIVVLGNGTIVEKGSYSALLAKKGEFAKNLKTFLRHTGPEEEATVHDGSEEEDDDYGLISSVEEIPEDAASITMRRENSFRRTLSRSSRSNGRHLKSLRNSLKTRNVNSLKEDEELVKGQKLIKKEFIETGKVKFSIYLEYLQAIGLFSIFFIILAFVMNSVAFIGSNLWLSAWTSDSKIFNSTDYPASQRDMRVGVYGALGLAQGIFVFIAHFWSAFGFVHASNILHKQLLNNILRAPMRFFDTTPTGRIVNRFAGDISTVDDTLPQSLRSWITCFLGIISTLVMICMATPVFTIIVIPLGIIYVSVQMFYVSTSRQLRRLDSVTRSPIYSHFSETVSGLPVIRAFEHQQRFLKHNEERIDTNQKCVFSWITSNRWLAIRLELVGNLTVFFSALMMVIYRDTLSGDTVGFVLSNALNITQTLNWLVRMTSEIETNIVAVERITEYTKVENEAPWVTDKRPPPDWPSKGKIQFNNYQVRYRPELDLVLRGITCDIGSMEKIGVVGRTGAGKSSLTNCLFRILEAAGGQIIIDGVDIASIGLHDLREKLTIIPQDPILFSGSLRMNLDPFNNYSDEEIWKALELAHLKSFVASLQLGLSHEVTEAGGNLSIGQRQLLCLGRALLRKSKILVLDEATAAVDLETDNLIQTTIQNEFAHCTVITIAHRLHTIMDSDKVMVLDNGKIIEYGSPEELLQIPGPFYFMAKEAGIENVNSTKF

SEQ ID NO: 43 - DNA, 5300 bp, Homo sapiens
  CDS (102)..(4739)
aggataattcctgttccactttctttgatgaaacaagtaaagaagaaacaacacaatcatattaatagaagagtcttcgttccagacgcagtccaggaatcatgctggagaagttctgcaactctactttttggaattcctcattcctggacagtccggaggcagacctgccactttgttttgagcaaactgttctggtgtggattcccttgggcttcctatggctcctggccccctggcagcttctccacgtgtataaatccaggaccaagagatcctctaccaccaaactctatcttgctaagcaggtattcgttggttttcttcttattctagcagccatagagctggcccttgtactcacagaagactctggacaagccacagtccctgctgttcgatataccaatccaagcctctacctaggcacatggctcctggttttgctgatccaatacagcagacaatggtgtgtacagaaaaactcctggttcctgtccctattctggattctctcgatactctgtggcactttccaatttcagactctgatccggacactcttacagggtgacaattctaatctagcctactcctgcctgttcttcatctcctacggattccagatcctgatcctgatcttttcagcattttcagaaaataatgagtcatcaaataatccatcatccatagcttcattcctgagtagcattacctacagctggtatgacagcatcattctgaaaggctacaagcgtcctctgacactcgaggatgtctgggaagttgatgaagagatgaaaaccaagacattagtgagcaagtttgaaacgcacatgaagagagagctgcagaaagccaggcgggcactccagagacggcaggagaagagctcccagcagaactctggagccaggctgcctggcttgaacaagaatcagagtcaaagccaagatgcccttgtcctggaagatgttgaaaagaaaaaaaagaagtctgggaccaaaaaagatgttccaaaatcctggttgatgaaggctctgttcaaaactttctacatggtgctcctgaaatcattcctactgaagctagtgaatgacatcttcacgtttgtgagtcctcagctgctgaaattgctgatctcctttgcaagtgaccgtgacacatatttgtggattggatatctctgtgcaatcctcttattcactgcggctctcattcagtctttctgccttcagtgttatttccaactgtgcttcaagctgggtgtaaaagtacggacagctatcatggcttctgtatataagaaggcattgaccctatccaacttggccaggaaggagtacaccattggagaaacagtgaacctgatgtctgtggatgcccagaagctcatggatgtgaccaacttcatgcacatgctgtggtcaagtgttctacagattgtcttatctatcttcttcctatggagagagttgggaccctcagtcttagcaggtgttggggtgatggtgcttgtaatcccaattaatgcgatactgtccaccaagagtaagaccattcaggtcaaaaatatgaagaataaagacaaacgtttaaagatcatgaatgagattcttagtggaatcaagatcctgaaatattttgcctgggaaccttcattcagagaccaagtacaaaacctccggaagaaagagctcaagaacctgctggcctttagtcaactacagtgtgtagtaatattcgtcttccagttaactccagtcctggtatctgtggtcacattttctgtttatgtcctggtggatagcaacaatattttggatgcacaaaaggccttcacctccattaccctcttcaatatcctgcgctttcccctgagcatgcttcccatgatgatctcctccatgctccaggccagtgtttccacagagcggctagagaagtacttgggaggggatgacttggacacatctgccattcgacatgactgcaattttgacaaagccatgcagttttctgaggcctcctttacctgggaacatgattcggaagccacagtccgagatgtgaacctggacattatggcaggccaacttgtggctgtgataggccctgtcggctctgggaaatcctccttgatatcagccatgctgggagaaatggaaaatgtccacgggcacatcaccatcaagggcaccactgcctatgtcccacagcagtcctggattcagaatggcaccataaaggacaacatcctttttggaacagagtttaatgaaaagaggtaccagcaagtactggaggcctgtgctctcctcccagacttggaaatgctgcctggaggagatttggctgagattggagagaagggtataaatcttagtgggggtcagaagcagcggatcagcctggccagagctacctaccaaaatttagacatctatcttctagatgaccccctgtctgcagtggatgctcatgtaggaaaacatatttttaataaggtcttgggccccaatggcctgttgaaaggcaagactcgactcttggttacacatagcatgcactttcttcctcaagtggatgagattgtagttctggggaatggaacaattgtagagaaaggatcctacagtgctctcctggccaaaaaaggagagtttgctaagaatctgaagacatttctaagacatacaggccctgaagaggaagccacagtccatgatggcagtgaagaagaagacgatgactatgggctgatatccagtgtggaagagatccccgaagatgcagcctccataaccatgagaagagagaacagctttcgtcgaacacttagccgcagttctaggtccaatggcaggcatctgaagtccctgagaaactccttgaaaactcggaatgtgaatagcctgaaggaagacgaagaactagtgaaaggacaaaaactaattaagaaggaattcatagaaactggaaaggtgaagttctccatctacctggagtacctacaagcaataggattgttttcgatattcttcatcatccttgcgtttgtgatgaattctgtggcttttattggatccaacctctggctcagtgcttggaccagtgactctaaaatcttcaatagcaccgactatccagcatctcagagggacatgagagttggagtctacggagctctgggattagcccaaggtatatttgtgttcatagcacatttctggagtgcctttggtttcgtccatgcatcaaatatcttgcacaagcaactgctgaacaatatccttcgagcacctatgagattttttgacacaacacccacaggccggattgtgaacaggtttgccggcgatatttccacagtggatgacaccctgcctcagtccttgcgcagctggattacatgcttcctggggataatcagcacccttgtcatgatctgcatggccactcctgtcttcaccatcatcgtcattcctcttggcattatttatgtatctgttcagatgttttatgtgtctacctcccgccagctgaggcgtctggactctgtcaccaggtccccaatctactctcacttcagcgagaccgtatcaggtttgccagttatccgtgcctttgagcaccagcagcgatttctgaaacacaatgaggagaggattgacaccaaccagaaatgtgtcttttcctggatcacctccaacaggtggcttgcaattcgcctggagctggttgggaacctgactgtcttcttttcagccttgatgatggttatttatagagataccctaagtggggacactgttggctttgttctgtccaatgcactcaatatcacacaaaccctgaactggctggtgaggatgacatcagaaatagagaccaacattgtggctgttgagcgaataactgagtacacaaaagtggaaaatgaggcaccctgggtgactgataagaggcctccgccagattggcccagcaaaggcaagatccagtttaacaactaccaagtgcggtaccgacctgagctggatctggtcctcagagggatcacttgtgacatcggtagcatggagaagattggtgtggtgggcaggacaggagctggaaagtcatccctcacaaactgcctcttcagaatcttagaggctgccggtggtcagattatcattgatggagtagatattgcttccattgggctccacgacctccgagagaagctgaccatcatcccccaggaccccatcctgttctctggaagcctgaggatgaatctcgaccctttcaacaactactcagatgaggagatttggaaggccttggagctggctcacctcaagtcttttgtggccagcctgcaacttgggttatcccacgaagttacagaggctggtggcaacctgagcataggccagaggcagctgctgtgcctgggcagggctctgcttcggaaatccaagatcctggtcctggatgaggccactgctgcggtggatctagagacagacaacctcattcagacgaccatccaaaacgagttcgcccactgcacagtgatcaccatcgcccacaggctgcataccatcatggacagtgacaaggtaatggtcctagacaacgggaagattatagagtacggcagccctgaagaactgctacaaatccctggacccttttactttatggctaaggaagctggcattgagaatgtgaacagcacaaaattctagcagaaggccccatgggttagaaaaggactataagaataatttcttatttaattttattttttataaaatacagaatacatacaaaagtgtgtataaaatgtacgttttaaaaaaggataagtgaacacccatgaacctactacccaggttaagaaaataaatgtcaccaggtacttgagaaacccctcgattgtctacctcgatcgtacttccttgctacccacccctcccagggacaaccactgtcctgaatttcacgataattattcctttgcctttcatttctgttttatcacctttgtatgtatctttaaacaacatatacccttttttacttatgtaaatggactgactcatactgcatacatcttctatgacttgattcttttgttcaatattatatctgagattcatccatggtgatgcaaataggtgcattattttttttcactgctctgtagtctggcattgtatgaatacagcacaatgtatcagttttaatattggggatcattagcattattctcaggtttttaaaaattataagcagtactactatgg

SEQ ID NO: 44 - protein, 1545 aa, Homo sapiens
MLEKFCNSTFWNSSFLDSPEADLPLCFEQTVLVWIPLGFLWLLAPWQLLHVYKSRTKRSSTTKLYLAKQVFVGFLLILAAIELALVLTEDSGQATVPAVRYTNPSLYLGTWLLVLLIQYSRQWCVQKNSWFLSLFWILSILCGTFQFQTLIRTLLQGDNSNLAYSCLFFISYGFQILILIFSAFSENNESSNNPSSIASFLSSITYSWYDSIILKGYKRPLTLEDVWEVDEEMKTKTLVSKFETHMKRELQKARRALQRRQEKSSQQNSGARLPGLNKNQSQSQDALVLEDVEKKKKKSGTKKDVPKSWLMKALFKTFYMVLLKSFLLKLVNDIFTFVSPQLLKLLISFASDRDTYLWIGYLCAILLFTAALIQSFCLQCYFQLCFKLGVKVRTAIMASVYKKALTLSNLARKEYTIGETVNLMSVDAQKLMDVTNFMHMLWSSVLQIVLSIFFLWRELGPSVLAGVGVMVLVIPINAILSTKSKTIQVKNMKNKDKRLKIMNEILSGIKILKYFAWEPSFRDQVQNLRKKELKNLLAFSQLQCVVIFVFQLTPVLVSVVTFSVYVLVDSNNILDAQKAFTSITLFNILRFPLSMLPMMISSMLQASVSTERLEKYLGGDDLDTSAIRHDCNFDKAMQFSEASFTWEHDSEATVRDVNLDIMAGQLVAVIGPVGSGKSSLISAMLGEMENVHGHITIKGTTAYVPQQSWIQNGTIKDNILFGTEFNEKRYQQVLEACALLPDLEMLPGGDLAEIGEKGINLSGGQKQRISLARATYQNLDIYLLDDPLSAVDAHVGKHIFNKVLGPNGLLKGKTRLLVTHSMHFLPQVDEIVVLGNGTIVEKGSYSALLAKKGEFAKNLKTFLRHTGPEEEATVHDGSEEEDDDYGLISSVEEIPEDAASITMRRENSFRRTLSRSSRSNGRHLKSLRNSLKTRNVNSLKEDEELVKGQKLIKKEFIETGKVKFSIYLEYLQAIGLFSIFFIILAFVMNSVAFIGSNLWLSAWTSDSKIFNSTDYPASQRDMRVGVYGALGLAQGIFVFIAHFWSAFGFVHASNILHKQLLNNILRAPMRFFDTTPTGRIVNRFAGDISTVDDTLPQSLRSWITCFLGIISTLVMICMATPVFTIIVIPLGIIYVSVQMFYVSTSRQLRRLDSVTRSPIYSHFSETVSGLPVIRAFEHQQRFLKHNEERIDTNQKCVFSWITSNRWLAIRLELVGNLTVFFSALMMVIYRDTLSGDTVGFVLSNALNITQTLNWLVRMTSEIETNIVAVERITEYTKVENEAPWVTDKRPPPDWPSKGKIQFNNYQVRYRPELDLVLRGITCDIGSMEKIGVVGRTGAGKSSLTNCLFRILEAAGGQIIIDGVDIASIGLHDLREKLTIIPQDPILFSGSLRMNLDPFNNYSDEEIWKALELAHLKSFVASLQLGLSHEVTEAGGNLSIGQRQLLCLGRALLRKSKILVLDEATAAVDLETDNLIQTTIQNEFAHCTVITIAHRLHTIMDSDKVMVLDNGKIIEYGSPEELLQIPGPFYFMAKEAGIENVNSTKF

SEQ ID NO: 45 - DNA, 5300 bp, Homo sapiens
  CDS (102)..(4739)
aggataattcctgttccactttctttgatgaaacaagtaaagaagaaacaacacaatcatattaatagaagagtcttcgttccagacgcagtccaggaatcatgctggagaagttctgcaactctactttttggaattcctcattcctggacagtccggaggcagacctgccactttgttttgagcaaactgttctggtgtggattcccttgggcttcctatggctcctggccccctggcagcttctccacgtgtataaatccaggaccaagagatcctctaccaccaaactctatcttgctaagcaggtattcgttggttttcttcttattctagcagccatagagctggcccttgtactcacagaagactctggacaagccacagtccctgctgttcgatataccaatccaagcctctacctaggcacatggctcctggttttgctgatccaatacagcagacaatggtgtgtacagaaaaactcctggttcctgtccctattctggattctctcgatactctgtggcactttccaatttcagactctgatccggacactcttacagggtgacaattctaatctagcctactcctgcctgttcttcatctcctacggattccagatcctgatcctgatcttttcagcattttcagaaaataatgagtcatcaaataatccatcatccatagcttcattcctgagtagcattacctacagctggtatgacagcatcattctgaaaggctacaagcgtcctctgacactcgaggatgtctgggaagttgatgaagagatgaaaaccaagacattagtgagcaagtttgaaacgcacatgaagagagagctgcagaaagccaggcgggcactccagagacggcaggagaagagctcccagcagaactctggagccaggctgcctggcttgaacaagaatcagagtcaaagccaagatgcccttgtcctggaagatgttgaaaagaaaaaaaagaagtctgggaccaaaaaagatgttccaaaatcctggttgatgaaggctctgttcaaaactttctacatggtgctcctgaaatcattcctactgaagctagtgaatgacatcttcacgtttgtgagtcctcagctgctgaaattgctgatctcctttgcaagtgaccgtgacacatatttgtggattggatatctctgtgcaatcctcttattcactgcggctctcattcagtctttctgccttcagtgttatttccaactgtgcttcaagctgggtgtaaaagtacggacagctatcatggcttctgtatataagaaggcattgaccttatccaacttggccaggaaggagtacaccgttggagaaacagtgaacctgatgtctgtggatgcccagaagctcatggatgtgaccaacttcatgcacatgctgtggtcaagtgttctacagattgtcttatctatcttcttcctatggagagagttgggaccctcagtcttagcaggtgttggggtgatggtgcttgtaatcccaattaatgcgatactgtccaccaagagtaagaccattcaggtcaaaaatatgaagaataaagacaaacgtttaaagatcatgaatgagattcttagtggaatcaagatcctgaaatattttgcctgggaaccttcattcagagaccaagtacaaaacctccggaagaaagagctcaagaacctgctggcctttagtcaactacagtgtgtagtaatattcgtcttccagttaactccagtcctggtatctgtggtcacattttctgtttatgtcctggtggatagcaacaatattttggatgcacaaaaggccttcacctccattaccctcttcaatatcctgcgctttcccctgagcatgcttcccatgatgatctcctccatgctccaggccagtgtttccacagagcggctagagaagtacttgggaggggatgacttggacacatctgccattcgacatgactgcaattttgacaaagccatgcagttttctgaggcctcctttacctgggaacatgattcggaagccacagtccgagatgtgaacctggacattatggcaggccaacttgtggctgtgataggccctgtcggctctgggaaatcctccttgatatcagccatgctgggagaaatggaaaatgtccacgggcacatcaccatcaagggcaccactgcctatgtcccacagcagtcctggattcagaatggcaccataaaggacaacatcctttttggaacagagtttaatgaaaagaggtaccagcaagtactggaggcctgtgctctcctcccagacttggaaatgctgcctggaggagatttggctgagattggagagaagggtataaatcttagtgggggtcagaagcagcggatcagcctggccagagctacctaccaaaatttagacatctatcttctagatgaccccctgtctgcagtggatgctcatgtaggaaaacatatttttaataaggtcttgggccccaatggcctgttgaaaggcaagactcgactcttggttacacatagcatgcactttcttcctcaagtggatgagattgtagttctggggaatggaacaattgtagagaaaggatcctacagtgctctcctggccaaaaaaggagagtttgctaagaatctgaagacatttctaagacatacaggccctgaagaggaagccacagtccatgatggcagtgaagaagaagacgatgactatgggctgatatccagtgtggaagagatccccgaagatgcagcctccataaccatgagaagagagaacagctttcgtcgaacacttagccgcagttctaggtccaatggcaggcatctgaagtccctgagaaactccttgaaaactcggaatgtgaatagcctgaaggaagacgaagaactagtgaaaggacaaaaactaattaagaaggaattcatagaaactggaaaggtgaagttctccatctacctggagtacctacaagcaataggattgttttcgatattcttcatcatccttgcgtttgtgatgaattctgtggcttttattggatccaacctctggctcagtgcttggaccagtgactctaaaatcttcaatagcaccgactatccagcatctcagagggacatgagagttggagtctacggagctctgggattagcccaaggtatatttgtgttcatagcacatttctggagtgcctttggtttcgtccatgcatcaaatatcttgcacaagcaactgctgaacaatatccttcgagcacctatgagattttttgacacaacacccacaggccggattgtgaacaggtttgccggcgatatttccacagtggatgacaccctgcctcagtccttgcgcagctggattacatgcttcctggggataatcagcacccttgtcatgatctgcatggccactcctgtcttcaccatcatcgtcattcctcttggcattatttatgtatctgttcagatgttttatgtgtctacctcccgccagctgaggcgtctggactctgtcaccaggtccccaatctactctcacttcagcgagaccgtatcaggtttgccagttatccgtgcctttgagcaccagcagcgatttctgaaacacaatgaggagaggattgacaccaaccagaaatgtgtcttttcctggatcacctccaacaggtggcttgcaattcgcctggagctggttgggaacctgactgtcttcttttcagccttgatgatggttatttatagagataccctaagtggggacactgttggctttgttctgtccaatgcactcaatatcacacaaaccctgaactggctggtgaggatgacatcagaaatagagaccaacattgtggctgttgagcgaataactgagtacacaaaagtggaaaatgaggcaccctgggtgactgataagaggcctccgccagattggcccagcaaaggcaagatccagtttaacaactaccaagtgcggtaccgacctgagctggatctggtcctcagagggatcacttgtgacatcggtagcatggagaagattggtgtggtgggcaggacaggagctggaaagtcatccctcacaaactgcctcttcagaatcttagaggctgccggtggtcagattatcattgatggagtagatattgcttccattgggctccacgacctccgagagaagctgaccatcatcccccaggaccccatcctgttctctggaagcctgaggatgaatctcgaccctttcaacaactactcagatgaggagatttggaaggccttggagctggctcacctcaagtcttttgtggccagcctgcaacttgggttatcccacgaagttacagaggctggtggcaacctgagcataggccagaggcagctgctgtgcctgggcagggctctgcttcggaaatccaagatcctggtcctggatgaggccactgctgcggtggatctagagacagacaacctcattcagacgaccatccaaaacgagttcgcccactgcacagtgatcaccatcgcccacaggctgcataccatcatggacagtgacaaggtaatggtcctagacaacgggaagattatagagtacggcagccctgaagaactgctacaaatccctggacccttttactttatggctaaggaagctggcattgagaatgtgaacagcacaaaattctagcagaaggccccatgggttagaaaaggactataagaataatttcttatttaattttattttttataaaatacagaatacatacaaaagtgtgtataaaatgtacgttttaaaaaaggataagtgaacacccatgaacctactacccaggttaagaaaataaatgtcaccaggtacttgagaaacccctcgattgtctacctcgatcgtacttccttgctacccacccctcccagggacaaccactgtcctgaatttcacgataattattcctttgcctttcatttctgttttatcacctttgtatgtatctttaaacaacatatacccttttttacttatgtaaatggactgactcatactgcatacatcttctatgacttgattcttttgttcaatattatatctgagattcatccatggtgatgcaaataggtgcattattttttttcactgctctgtagtctggcattgtatgaatacagcacaatgtatcagttttaatattggggatcattagcattattctcaggtttttaaaaattataagcagtactactatgg

SEQ ID NO: 46 - protein, 1545 aa, Homo sapiens [sequence omitted]

SEQ ID NO: 47 - DNA, 5300 bp, Homo sapiens
  CDS (102)..(4739)
aggataattcctgttccactttctttgatgaaacaagtaaagaagaaacaacacaatcatattaatagaagagtcttcgttccagacgcagtccaggaatcatgctggagaagttctgcaactctactttttggaattcctcattcctggacagtccggaggcagacctgccactttgttttgagcaaactgttctggtgtggattcccttgggcttcctatggctcctggccccctggcagcttctccacgtgtataaatccaggaccaagagatcctctaccaccaaactctatcttgctaagcaggtattcgttggttttcttcttattctagcagccatagagctggcccttgtactcacagaagactctggacaagccacagtccctgctgttcgatataccaatccaagcctctacctaggcacatggctcctggttttgctgatccaatacagcagacaatggtgtgtacagaaaaactcctggttcctgtccctattctggattctctcgatactctgtggcactttccaatttcagactctgatccggacactcttacagggtgacaattctaatctagcctactcctgcctgttcttcatctcctacggattccagatcctgatcctgatcttttcagcattttcagaaaataatgagtcatcaaataatccatcatccatagcttcattcctgagtagcattacctacagctggtatgacagcatcattctgaaaggctacaagcgtcctctgacactcgaggatgtctgggaagttgatgaagagatgaaaaccaagacattagtgagcaagtttgaaacgcacatgaagagagagctgcagaaagccaggcgggcactccagagacggcaggagaagagctcccagcagaactctggagccaggctgcctggcttgaacaagaatcagagtcaaagccaagatgcccttgtcctggaagatgttgaaaagaaaaaaaagaagtctgggaccaaaaaagatgttccaaaatcctggttgatgaaggctctgttcaaaactttctacatggtgctcctgaaatcattcctactgaagctagtgaatgacatcttcacgtttgtgagtcctcagctgctgaaattgctgatctcctttgcaagtgaccgtgacacatatttgtggattggatatctctgtgcaatcctcttattcactgcggctctcattcagtctttctgccttcagtgttatttccaactgtgcttcaagctgggtgtaaaagtacggacagctatcatggcttctgtatataagaaggcattgaccctatccaacttggccaggaaggagtacaccgttggagaaacagtgaacctgatgtctgtggatgcccagaagctcatggatgtgaccaacttcatgcacatgctgtggtcaagtgttctacagattgtcttatctatcttcttcctatggagagagttgggaccctcagtcttagcaggtgttggggtgatggtgcttgtaatcccaattaatgcgatactgtccaccaagagtaagaccattcaggtcaaaaatatgaagaataaagacaaacgtttaaagatcatgaatgagattcttagtggaatcaagatcctgaaatattttgcctgggaaccttcattcagagaccaagtacaaaacctccggaagaaagagctcaagaacctgctggcctttagtcaactacagtgtgtagtaatattcgtcttccagttaactccagtcctggtatctgtggtcacattttctgtttatgtcctggtggatagcaacaatattttggatgcacaaaaggccttcacctccattaccctcttcaatatcctgcgctttcccctgagcatgcttcccatgatgatctcctccatgctccaggccagtgtttccacagagcggctagagaagtacttgggaggggatgacttggacacatctgccattcgacatgactgcaattttgacaaagccatgcagttttctgaggcctcctttacctgggaacatgattcggaagccacagtccgagatgtgaacctggacattatggcaggccaacttgtggctgtgataggccctgtcggctctgggaaatcctccttgatatcagccatgctgggagaaatggaaaatgtccacgggcacatcaccatcaagggcaccactgcctatgtcccacagcagtcctggattcagaatggcaccataaaggacaacatcctttttggaacagagtttaatgaaaagaggtaccagcaagtactggaggcctgtgctctcctcccagacttggaaatgctgcctggaggagatttggctgagattggagagaagggtataaatcttagtgggggtcagaagcagcggatcagcctggccagagctacctaccaaaatttagacatctatcttctagatgaccccctgtctgcagtggatgctcatgtaggaaaacatatttttaataaggtcttgggccccaatggcctgttgaaaggcaagactcgactcttggttacacatagcatgcactttcttcctcaagtggatgagattgtagttctggggaatggaacaattgtagagaaaggatcctacagtgctctcctggccaaaaaaggagagtttgctaagaatctgaagacatttctaagacatacaggccctgaagaggaagccacagtccatgatggcagtgaagaagaagacgatgactatgggctgatatccagtgtggaagagatccccgaagatgcagcctccataaccatgagaagagagaacagctttcgtcgaacacttagccgcagttctaggtccaatggcaggcatctgaagtccctgagaaactccttgaaaactcggaatgtgaatagcctgaaggaagacgaagaactagtgaaaggacaaaaactaattaagaaggaattcatagaaactggaaaggtgaagttctccatctacctggagtacctacaagcaataggattgttttcaatattcttcatcatccttgcgtttgtgatgaattctgtggcttttattggatccaacctctggctcagtgcttggaccagtgactctaaaatcttcaatagcaccgactatccagcatctcagagggacatgagagttggagtctacggagctctgggattagcccaaggtatatttgtgttcatagcacatttctggagtgcctttggtttcgtccatgcatcaaatatcttgcacaagcaactgctgaacaatatccttcgagcacctatgagattttttgacacaacacccacaggccggattgtgaacaggtttgccggcgatatttccacagtggatgacaccctgcctcagtccttgcgcagctggattacatgcttcctggggataatcagcacccttgtcatgatctgcatggccactcctgtcttcaccatcatcgtcattcctcttggcattatttatgtatctgttcagatgttttatgtgtctacctcccgccagctgaggcgtctggactctgtcaccaggtccccaatctactctcacttcagcgagaccgtatcaggtttgccagttatccgtgcctttgagcaccagcagcgatttctgaaacacaatgaggagaggattgacaccaaccagaaatgtgtcttttcctggatcacctccaacaggtggcttgcaattcgcctggagctggttgggaacctgactgtcttcttttcagccttgatgatggttatttatagagataccctaagtggggacactgttggctttgttctgtccaatgcactcaatatcacacaaaccctgaactggctggtgaggatgacatcagaaatagagaccaacattgtggctgttgagcgaataactgagtacacaaaagtggaaaatgaggcaccctgggtgactgataagaggcctccgccagattggcccagcaaaggcaagatccagtttaacaactaccaagtgcggtaccgacctgagctggatctggtcctcagagggatcacttgtgacatcggtagcatggagaagattggtgtggtgggcaggacaggagctggaaagtcatccctcacaaactgcctcttcagaatcttagaggctgccggtggtcagattatcattgatggagtagatattgcttccattgggctccacgacctccgagagaagctgaccatcatcccccaggaccccatcctgttctctggaagcctgaggatgaatctcgaccctttcaacaactactcagatgaggagatttggaaggccttggagctggctcacctcaagtcttttgtggccagcctgcaacttgggttatcccacgaagttacagaggctggtggcaacctgagcataggccagaggcagctgctgtgcctgggcagggctctgcttcggaaatccaagatcctggtcctggatgaggccactgctgcggtggatctagagacagacaacctcattcagacgaccatccaaaacgagttcgcccactgcacagtgatcaccatcgcccacaggctgcataccatcatggacagtgacaaggtaatggtcctagacaacgggaagattatagagtacggcagccctgaagaactgctacaaatccctggacccttttactttatggctaaggaagctggcattgagaatgtgaacagcacaaaattctagcagaaggccccatgggttagaaaaggactataagaataatttcttatttaattttattttttataaaatacagaatacatacaaaagtgtgtataaaatgtacgttttaaaaaaggataagtgaacacccatgaacctactacccaggttaagaaaataaatgtcaccaggtacttgagaaacccctcgattgtctacctcgatcgtacttccttgctacccacccctcccagggacaaccactgtcctgaatttcacgataattattcctttgcctttcatttctgttttatcacctttgtatgtatctttaaacaacatatacccttttttacttatgtaaatggactgactcatactgcatacatcttctatgacttgattcttttgttcaatattatatctgagattcatccatggtgatgcaaataggtgcattattttttttcactgctctgtagtctggcattgtatgaatacagcacaatgtatcagttttaatattggggatcattagcattattctcaggtttttaaaaattataagcagtactactatgg

SEQ ID NO: 48 - protein, 1545 aa, Homo sapiens [sequence omitted]

SEQ ID NO: 49 - DNA, 2830 bp, Homo sapiens
  misc_feature (597)..(597)
  misc_feature (597)..(597): wherein "n" is either C or an A.
  misc_feature (545)..(545): wherein "n" is either G or A.
  misc_feature (1382)..(1382): wherein "n" is either G or A.
  misc_feature (731)..(731): wherein "n" is either C or T.
  misc_feature (522)..(522): wherein "n" is either G or T.
  misc_feature (1597)..(1597): wherein "n" is either C or G.
  misc_feature (1334)..(1334): wherein "n" is either C or G.
  misc_feature (655)..(655): wherein "n" is either T or C.
  misc_feature (705)..(705): wherein "n" is either T or C.
cggacgcgtgggcggacgcgtgggtcgcccacgcgtccgacttgttgcagttgctgtaggattctaaatccaggtgattgtttcaaactgagcatcaacaacaaaaacatttgtatgatatctatatttcaatcatggaccaaaatcaacatttgaataaaacagcagaggcacaaccttcagagaataagaaaacaagatactgcaatggattgaagatgttcttggcagctctgtcactcagctttattgctaagacactaggtgcaattattatgaaaagttccatcattcatatagaacggagatttgagatatcctcttctcttgttggttttattgacggaagctttgaaattggaaatttgcttgtgattgtatttgtgagttactttggatccaaactacatagaccaaagttaattggaatcggttgtttcattatgggaattggaggtgttttgactgctttgccacatttcttcatgggatattacaggtattctaaagaaactaatatcnattcatcagaaaattcaacatcnaccttatccacttgtttaattaatcaaattttatcactcaatagagcatcanctgagatagtgggaaaaggttgtttaaaggaatctgggtcatacatgtggatatatgngttcatgggtaatatgcttcgtggaataggggagactcccatagtaccantggggctttcttacattgatgatttngctaaagaaggacattcttctttgtatttaggtatattgaatgcaatagcaatgattggtccaatcattggctttaccctgggatctctgttttctaaaatgtacgtggatattggatatgtagatctaagcactatcaggataactcctactgattctcgatgggttggagcttggtggcttaatttccttgtgtctggactattctccattatttcttccataccattctttttcttgccccaaactccaaataaaccacaaaaagaaagaaaagcttcactgtctttgcatgtgctggaaacaaatgatgaaaaggatcaaacagctaatttgaccaatcaaggaaaaaatattaccaaaaatgtgactggttttttccagtcttttaaaagcatccttactaatcccctgtatgttatgtttgtgcttttgacgttgttacaagtaagcagctatattggtgcttttacttatgtcttcaaatacgtagagcaacagtatggtcagccttcatctaaggctaacatcttattgggagtcataaccatacctatttttgcaagtggaatgtttttaggaggatatatcattaaaaaattnaaactgaacaccgttggaattgccaaattctcatgttttactgctgtnatgtcattgtccttttacctattatattttttcatactctgtgaaaacaaatcagttgccggactaaccatgacctatgatggaaataatccagtgacatctcatagagatgtaccactttcttattgcaactcagactgcaattgtgatgaaagtcaatgggaaccagtctgtggaaacaatggaataacttacatctcaccctgtctagcagnttgcaaatcttcaagtggcaataaaaagcctatagtgttttacaactgcagttgtttggaagtaactggtctccagaacagaaattactcagcccatttgggtgaatgcccaagagatgatgcttgtacaaggaaattttacttttttgttgcaatacaagtcttgaatttatttttctctgcacttggaggcacctcacatgtcatgctgattgttaaaattgttcaacctgaattgaaatcacttgcactgggtttccactcaatggttatacgagcactaggaggaattctagctccaatatattttggggctctgattgatacaacgtgtataaagtggtccaccaacaactgtggcacacgtgggtcatgtaggacatataattccacatcattttcaagggtctacttgggcttgtcttcaatgttaagagtctcatcacttgttttatatattatattaatttatgccatgaagaaaaaatatcaagagaaagatatcaatgcatcagaaaatggaagtgtcatggatgaagcaaacttagaatccttaaataaaaataaacattttgtcccttctgctggggcagatagtgaaacacattgttaaggggagaaaaaaagccacttctgcttctgtgtttccaaacagcattgcattgattcagtaagatgttatttttgaggagttcctggtcctttcactaagaatttccacatcttttatggtggaagtataaataagcctatgaacttataataaaacaaactgtaggtagaaaaaatgagagtactcattgttacattatagctacatatttgtggttaaggttagactatatgatccatacaaattaaagtgagagacatggttactgtgtaataaaagaaaaaatacttgttcaggtaattctaattcttaataaaacaaatgagtatcatacaggtagaggttaaaaaggaggagctagattcatatcctaagtaaagagaaatgcctagtgtctattttattaaacaaacaaacacagagtttgaactataatactaaggcctgaagtctagcttggatatatgctacaataatatctgttactcacataaaattatatatttcacagactttatcaatgtataattaacaattatcttgtttaagtaaatttagaatacatttaagtattgtggaagaaataaagacattccaatatttgcaaaaaaaaaaaaaaa

SEQ ID NO: 50 - protein, 691 aa, Homo sapiens
  MISC_FEATURE (155)..(155): wherein "X" is either P or T.
  MISC_FEATURE (130)..(130): wherein "X" is either D or Y.
  MISC_FEATURE (488)..(488): wherein "X" is either G or A.
  MISC_FEATURE (400)..(400): wherein "X" is either F or K.
  MISC_FEATURE (174)..(174): wherein "X" is either V or A.
MDQNQHLNKTAEAQPSENKKTRYCNGLKMFLAALSLSFIAKTLGAIIMKSSIIHIERRFEISSSLVGFIDGSFEIGNLLVIVFVSYFGSKLHRPKLIGIGCFIMGIGGVLTALPHFFMGYYRYSKETNIXSSENSTSTLSTCLINQILSLNRASXEIVGKGCLKESGSYMWIYXFMGNMLRGIGETPIVPLGLSYIDDFAKEGHSSLYLGILNAIAMIGPIIGFTLGSLFSKMYVDIGYVDLSTIRITPTDSRWVGAWWLNFLVSGLFSIISSIPFFFLPQTPNKPQKERKASLSLHVLETNDEKDQTANLTNQGKNITKNVTGFFQSFKSILTNPLYVMFVLLTLLQVSSYIGAFTYVFKYVEQQYGQPSSKANILLGVITIPIFASGMFLGGYIIKKXKLNTVGIAKFSCFTAVMSLSFYLLYFFILCENKSVAGLTMTYDGNNPVTSHRDVPLSYCNSDCNCDESQWEPVCGNNGITYISPCLAXCKSSSGNKKPIVFYNCSCLEVTGLQNRNYSAHLGECPRDDACTRKFYFFVAIQVLNLFFSALGGTSHVMLIVKIVQPELKSLALGFHSMVIRALGGILAPIYFGALIDTTCIKWSTNNCGTRGSCRTYNSTSFSRVYLGLSSMLRVSSLVLYIILIYAMKKKYQEKDINASENGSVMDEANLESLNKNKHFVPSAGADSETHC

SEQ ID NO: 51 - DNA, 19 bp, Homo sapiens
ttcaacatcaaccttatcc

SEQ ID NO: 52 - DNA, 19 bp, Homo sapiens
agagcatcacctgagatag

SEQ ID NO: 53 - DNA, 19 bp, Homo sapiens
tacacagttcgcccattaa

SEQ ID NO: 54 - DNA, 19 bp, Homo sapiens
agttcgccctttaacaaca

SEQ ID NO: 55 - DNA, 19 bp, Homo sapiens
ttaaactacacgttttcac

SEQ ID NO: 56 - DNA, 19 bp, Homo sapiens
aaactacgcgttttcactt

SEQ ID NO: 57 - DNA, 18 bp, Homo sapiens
aactgtaggcagaaaaaa

SEQ ID NO: 58 - DNA, 18 bp, Homo sapiens
taatcttaccttttccca

SEQ ID NO: 59 - DNA, 18 bp, Homo sapiens
tgatgaatcgatattagt

SEQ ID NO: 60 - DNA, 16 bp, Homo sapiens
taagaaattttcacgg

SEQ ID NO: 61 - DNA, 17 bp, Homo sapiens
tttcacgggagaagatt

SEQ ID NO: 62 - DNA, 18 bp, Homo sapiens
attatttttcctttgact

SEQ ID NO: 63 - DNA, 18 bp, Homo sapiens
tgaagcatatattgaaat

SEQ ID NO: 64 - DNA, 18 bp, Homo sapiens
tctttggcaaaatttttg

SEQ ID NO: 65 - DNA, 19 bp, Homo sapiens
aaatttttgatgcttaata

SEQ ID NO: 66 - DNA, 19 bp, Homo sapiens
ttttgatgcctaatagttt

SEQ ID NO: 67 - DNA, 19 bp, Homo sapiens
tttgatgctaaatagttta

SEQ ID NO: 68 - DNA, 19 bp, Homo sapiens
tattttgatggcttctctt

SEQ ID NO: 69 - DNA, 19 bp, Homo sapiens
tcaactggggtaaatgtat

SEQ ID NO: 70 - DNA, 19 bp, Homo sapiens
ggggtaaatgtatctctca

SEQ ID NO: 71 - DNA, 19 bp, Homo sapiens
ctataatgcacaaagaatg

SEQ ID NO: 72 - DNA, 19 bp, Homo sapiens
aaatgttgacagtgaggat

SEQ ID NO: 73 - DNA, 19 bp, Homo sapiens
gatttgcaacctgctagac

SEQ ID NO: 74 - DNA, 15 bp, Homo sapiens
gatagacatatatca

SEQ ID NO: 75 - DNA, 18 bp, Homo sapiens
caatgacattacagcagt

SEQ ID NO: 76 - DNA, 19 bp, Homo sapiens
gttcagtttcaatttttta

SEQ ID NO: 77 - DNA, 18 bp, Homo sapiens
agttctgggatacatgtg

SEQ ID NO: 78 - DNA, 16 bp, Homo sapiens
atgcatgacactataa

SEQ ID NO: 79 - DNA, 19 bp, Homo sapiens
ggatatatgtgttcatggg

SEQ ID NO: 80 - DNA, 19 bp, Homo sapiens
atagtaccattggggcttt

SEQ ID NO: 81 - DNA, 19 bp, Homo sapiens
tgatgatttcgctaaagaa

SEQ ID NO: 82 - DNA, 19 bp, Homo sapiens
ccatgataacgtctttcta

SEQ ID NO: 83 - DNA, 19 bp, Homo sapiens
tgtagcatacatccaagct

SEQ ID NO: 84 - DNA, 20 bp, Homo sapiens
aagctagacgtcagggcctt

SEQ ID NO: 85 - DNA, 18 bp, Homo sapiens
tcaggccttagtattata

SEQ ID NO: 86 - DNA, 19 bp, Homo sapiens
cctgtatgacactcatttg

SEQ ID NO: 87 - DNA, 19 bp, Homo sapiens
acaatgaggagaggattga

SEQ ID NO: 88 - DNA, 19 bp, Homo sapiens
ttgtgacattggtagcatg

SEQ ID NO: 89 - DNA, 18 bp, Homo sapiens
agtaagttctagagctca

SEQ ID NO: 90 - DNA, 18 bp, Homo sapiens
aggtcgtggagcccaatg

SEQ ID NO: 91 - DNA, 17 bp, Homo sapiens
tgaccaccagcagcctc

SEQ ID NO: 92 - DNA, 17 bp, Homo sapiens
gatctagagacagacaa

SEQ ID NO: 93 - DNA, 19 bp, Homo sapiens
caggctgcacaccatcatg

SEQ ID NO: 94 - DNA, 19 bp, Homo sapiens
gagtgtaggaggacagggc

SEQ ID NO: 95 - DNA, 19 bp, Homo sapiens
gccgggaaacacctgatgg

SEQ ID NO: 96 - DNA, 18 bp, Homo sapiens
ccagcagctattttctga

SEQ ID NO: 97 - DNA, 15 bp, Homo sapiens
actggaaaggtgaac

SEQ ID NO: 98 - DNA, 14 bp, Homo sapiens
aacaccatacagaa

SEQ ID NO: 99 - DNA, 17 bp, Homo sapiens
tctgtgagcacaagggc

SEQ ID NO: 100 - DNA, 19 bp, Homo sapiens
aagcagcatagtgctaagt

SEQ ID NO: 101 - DNA, 19 bp, Homo sapiens
aggggctgagaacctttgc

SEQ ID NO: 102 - DNA, 17 bp, Homo sapiens
ccccatgcattctatta

SEQ ID NO: 103 - DNA, 14 bp, Homo sapiens
tagatccctgtcag

SEQ ID NO: 104 - DNA, 19 bp, Homo sapiens
tgaacaaggagagagaagc

SEQ ID NO: 105 - DNA, 18 bp, Homo sapiens
agagtctttgttccagac

SEQ ID NO: 106 - DNA, 19 bp, Homo sapiens
ttctgtgcccatgatgatt

SEQ ID NO: 107 - DNA, 19 bp, Homo sapiens
ccccatgccacttttcctc

SEQ ID NO: 108 - DNA, 19 bp, Homo sapiens
acagggcctgtcacagcca

SEQ ID NO: 109 - DNA, 18 bp, Homo sapiens
ttctccaacggtgtactc

SEQ ID NO: 110 - DNA, 19 bp, Homo sapiens
agttggataaggtcaatgc

SEQ ID NO: 111 - DNA, 19 bp, Homo sapiens
agcctgggggtctcagcct

SEQ ID NO: 112 - DNA, 19 bp, Homo sapiens
ctcctgggtgtgtcaacat

SEQ ID NO: 113 - DNA, 19 bp, Homo sapiens
atggcaaagatgctgaggg

SEQ ID NO: 114 - DNA, 19 bp, Homo sapiens
ctgctgaggagaggagtga

SEQ ID NO: 115 - DNA, 19 bp, Homo sapiens
actaaccgaagactgaggg

SEQ ID NO: 116 - DNA, 17 bp, Homo sapiens
tggtaaaccaatatcta

SEQ ID NO: 117 - DNA, 19 bp, Homo sapiens
gggttctgtgtctctttga

SEQ ID NO: 118 - DNA, 19 bp, Homo sapiens
attgttttcgatattcttc

SEQ ID NO: 119 - DNA, 18 bp, Homo sapiens
tctttctgacagggagga

SEQ ID NO: 120 - DNA, 19 bp, Homo sapiens
ttcaacatcgaccttatcc

SEQ ID NO: 121 - DNA, 19 bp, Homo sapiens
agagcatcaactgagatag

SEQ ID NO: 122 - DNA, 19 bp, Homo sapiens
tacacagtttgcccattaa

SEQ ID NO: 123 - DNA, 19 bp, Homo sapiens
agttcgcccattaacaaca

SEQ ID NO: 124 - DNA, 19 bp, Homo sapiens
ttaaactacgcgttttcac

SEQ ID NO: 125 - DNA, 19 bp, Homo sapiens
aaactacgcattttcactt

SEQ ID NO: 126 - DNA, 18 bp, Homo sapiens
aactgtaggtagaaaaaa

SEQ ID NO: 127 - DNA, 18 bp, Homo sapiens
taatcttaacttttccca

SEQ ID NO: 128 - DNA, 18 bp, Homo sapiens
tgatgaattgatattagt

SEQ ID NO: 129 - DNA, 16 bp, Homo sapiens
taagaaaatttcacgg

SEQ ID NO: 130 - DNA, 17 bp, Homo sapiens
tttcacggaagaagatt

SEQ ID NO: 131 - DNA, 18 bp, Homo sapiens
attattttttctttgact

SEQ ID NO: 132 - DNA, 18 bp, Homo sapiens
tgaagcatgtattgaaat

SEQ ID NO: 133 - DNA, 18 bp, Homo sapiens
tctttggcgaaatttttg

SEQ ID NO: 134 - DNA, 19 bp, Homo sapiens
aaatttttgttgcttaata

SEQ ID NO: 135 - DNA, 19 bp, Homo sapiens
ttttgatgcttaatagttt

SEQ ID NO: 136 - DNA, 19 bp, Homo sapiens
tttgatgcttaatagttta

SEQ ID NO: 137 - DNA, 19 bp, Homo sapiens
tattttgatagcttctctt

SEQ ID NO: 138 - DNA, 19 bp, Homo sapiens
tcaactgggataaatgtat

SEQ ID NO: 139 - DNA, 19 bp, Homo sapiens
ggggtaaatttatctctca

SEQ ID NO: 140 - DNA, 19 bp, Homo sapiens
ctataatgcgcaaagaatg

SEQ ID NO: 141 - DNA, 19 bp, Homo sapiens
aaatgttgatagtgaggat

SEQ ID NO: 142 - DNA, 19 bp, Homo sapiens
gatttgcaagctgctagac

SEQ ID NO: 143 - DNA, 15 bp, Homo sapiens
gatagagatatatca

SEQ ID NO: 144 - DNA, 18 bp, Homo sapiens
caatgacatcacagcagt

SEQ ID NO: 145 - DNA, 19 bp, Homo sapiens
gttcagtttgaatttttta

SEQ ID NO: 146 - DNA, 18 bp, Homo sapiens
agttctggggtacatgtg

SEQ ID NO: 147 - DNA, 16 bp, Homo sapiens
atgcatgagactataa

SEQ ID NO: 148 - DNA, 19 bp, Homo sapiens
ggatatatgcgttcatggg

SEQ ID NO: 149 - DNA, 19 bp, Homo sapiens
atagtaccactggggcttt

SEQ ID NO: 150 - DNA, 19 bp, Homo sapiens
tgatgattttgctaaagaa

SEQ ID NO: 151 - DNA, 19 bp, Homo sapiens
ccatgataatgtctttcta

SEQ ID NO: 152 - DNA, 19 bp, Homo sapiens
tgtagcatatatccaagct

SEQ ID NO: 153 - DNA, 20 bp, Homo sapiens
aagctagacttcagggcctt

SEQ ID NO: 154 - DNA, 18 bp, Homo sapiens
tcaggccttcgtattata

SEQ ID NO: 155 - DNA, 19 bp, Homo sapiens
cctgtatgatactcatttg

SEQ ID NO: 156 - DNA, 19 bp, Homo sapiens
acaatgaggtgaggattga

SEQ ID NO: 157 - DNA, 19 bp, Homo sapiens
ttgtgacatcggtagcatg

SEQ ID NO: 158 - DNA, 18 bp, Homo sapiens
agtaagttgtagagctca

SEQ ID NO: 159 - DNA, 18 bp, Homo sapiens
aggtcgtgaagcccaatg

SEQ ID NO: 160 - DNA, 17 bp, Homo sapiens
tgaccaccggcagcctc

SEQ ID NO: 161 - DNA, 17 bp, Homo sapiens
gatctagaaacagacaa

SEQ ID NO: 162 - DNA, 19 bp, Homo sapiens
caggctgcataccatcatg

SEQ ID NO: 163 - DNA, 19 bp, Homo sapiens
gagtgtagggggacagggc

SEQ ID NO: 164 - DNA, 19 bp, Homo sapiens
gccgggaaatacctgatgg

SEQ ID NO: 165 - DNA, 18 bp, Homo sapiens
ccagcagcgattttctga

SEQ ID NO: 166 - DNA, 15 bp, Homo sapiens
actggaagggtgaac

SEQ ID NO: 167 - DNA, 14 bp, Homo sapiens
aacaccacacagaa

SEQ ID NO: 168 - DNA, 17 bp, Homo sapiens
tctgtgagtacaagggc

SEQ ID NO: 169 - DNA, 19 bp, Homo sapiens
aagcagcattgtgctaagt

SEQ ID NO: 170 - DNA, 19 bp, Homo sapiens
aggggctgaaaacctttgc

SEQ ID NO: 171 - DNA, 17 bp, Homo sapiens
ccccatgaattctatta

SEQ ID NO: 172 - DNA, 14 bp, Homo sapiens
tagatctctgtcag

SEQ ID NO: 173 - DNA, 19 bp, Homo sapiens
tgaacaaggggagagaagc

SEQ ID NO: 174 - DNA, 18 bp, Homo sapiens
agagtcttcgttccagac

SEQ ID NO: 175 - DNA, 19 bp, Homo sapiens
ttctgtgcctatgatgatt

SEQ ID NO: 176 - DNA, 19 bp, Homo sapiens
ccccatgccgcttttcctc

SEQ ID NO: 177 - DNA, 19 bp, Homo sapiens
acagggcctatcacagcca

SEQ ID NO: 178 - DNA, 18 bp, Homo sapiens
ttctccaatggtgtactc

SEQ ID NO: 179 - DNA, 19 bp, Homo sapiens
agttggatagggtcaatgc

SEQ ID NO: 180 - DNA, 19 bp, Homo sapiens
agcctggggttctcagcct

SEQ ID NO: 181 - DNA, 19 bp, Homo sapiens
ctcctgggtatgtcaacat

SEQ ID NO: 182 - DNA, 19 bp, Homo sapiens
atggcaaagctgctgaggg

SEQ ID NO: 183 - DNA, 19 bp, Homo sapiens
ctgctgaggggaggagtga

SEQ ID NO: 184 - DNA, 19 bp, Homo sapiens
actaaccgaggactgaggg

SEQ ID NO: 185 - DNA, 17 bp, Homo sapiens
tggtaaatcaatatcta

SEQ ID NO: 186 - DNA, 19 bp, Homo sapiens
gggttctgtctctctttga

SEQ ID NO: 187 - DNA, 19 bp, Homo sapiens
attgttttcaatattcttc

SEQ ID NO: 188 - DNA, 18 bp, Homo sapiens
tctttctgatagggagga

SEQ ID NO: 189 - DNA, 41 bp, Homo sapiens
attaaacaagtggataaggtcgatgttgaattttctgatga

SEQ ID NO: 190 - DNA, 41 bp, Homo sapiens
accttttcccactatctcaggtgatgctctattgagtgata

SEQ ID NO: 191 - DNA, 41 bp, Homo sapiens
aacctgtgttgttaatgggcgaactgtgtatattaacacta

SEQ ID NO: 192 - DNA, 41 bp, Homo sapiens
gtttaaacctgtgttgttaatgggcgaactgtgtatattaa

SEQ ID NO: 193 - DNA, 41 bp, Homo sapiens
tttgcatagaagtgaaaacgcgtagtttaaacctgtgttgt

SEQ ID NO: 194 - DNA, 41 bp, Homo sapiens
aatttgcatagaagtgaaaacgcgtagtttaaacctgtgtt

SEQ ID NO: 195 - DNA, 41 bp, Homo sapiens
tgagtactctcattttttctacctacagtttgttttattat

SEQ ID NO: 196 - DNA, 41 bp, Homo sapiens
actgtcaatattaattcttaccttttcccactatctcaggt

SEQ ID NO: 197 - DNA, 41 bp, Homo sapiens
tgttgaattttctgatgaattgatattagtttctttagaat

SEQ ID NO: 198 - DNA, 41 bp, Homo sapiens
caaaatcttcttccgtgaaaatttcttacataaaatatatg

SEQ ID NO: 199 - DNA, 41 bp, Homo sapiens
caagaccatcaaaatcttcttccgtgaaaatttcttacata

SEQ ID NO: 200 - DNA, 41 bp, Homo sapiens
aggaattaatatagtcaaagaaaaaataatgaaatatattt

SEQ ID NO: 201 - DNA, 41 bp, Homo sapiens
attatgttaatatttcaatatatgcttcaattgaaaattat

SEQ ID NO: 202 - DNA, 41 bp, Homo sapiens
ctattaagcatcaaaaatttcgccaaagaaatacttaatca

SEQ ID NO: 203 - DNA, 41 bp, Homo sapiens
cattgataaactattaagcatcaaaaatttcgccaaagaaa

SEQ ID NO: 204 - DNA, 41 bp, Homo sapiens
tctacattgataaactattaagcatcaaaaatttcgccaaa

SEQ ID NO: 205 - DNA, 41 bp, Homo sapiens
ttctacattgataaactattaagcatcaaaaatttcgccaa

SEQ ID NO: 206 - DNA, 41 bp, Homo sapiens
atccaaaaccaaagagaagctatcaaaatatttctaaattt

SEQ ID NO: 207 - DNA, 41 bp, Homo sapiens
gcctgtgagagataaatttaccccagttgataaccagtggt

SEQ ID NO: 208 - DNA, 41 bp, Homo sapiens
caaattgcctgtgagagataaatttaccccagttgataacc

SEQ ID NO: 209 - DNA, 41 bp, Homo sapiens
ttcagttacatcattctttgtgcattatagaatatttagca

SEQ ID NO: 210 - DNA, 41 bp, Homo sapiens
ggtttctgaacatcctcactatcaacattttcagttacatc

SEQ ID NO: 211 - DNA, 41 bp, Homo sapiens
tgccacttgaagatttgcaacctgctagacagggtgagatg

SEQ ID NO: 212 - DNA, 41 bp, Homo sapiens
ttctggaaatatatgatagacatatatcaaaaagagagaga

SEQ ID NO: 213 - DNA, 41 bp, Homo sapiens
aggtaaaaggacaatgacatcacagcagtaaaacatgagaa

SEQ ID NO: 214 - DNA, 41 bp, Homo sapiens
attccaacggtgttcagtttgaattttttaatgatatatcc

SEQ ID NO: 215 - DNA, 41 bp, Homo sapiens
attttactttaagttctgggatacatgtgcagaatgtgcat

SEQ ID NO: 216 - DNA, 41 bp, Homo sapiens
tcattaggtgtgtttatagtctcatgcatatgaaaatgttt

SEQ ID NO: 217 - DNA, 41 bp, Homo sapiens
gaagcatattacccatgaacacatatatccacatgtatgac

SEQ ID NO: 218 - DNA, 41 bp, Homo sapiens
atcaatgtaagaaagccccaatggtactatgggagtctccc

SEQ ID NO: 219 - DNA, 41 bp, Homo sapiens
gaagaatgtccttctttagcgaaatcatcaatgtaagaaag

SEQ ID NO: 220 - DNA, 41 bp, Homo sapiens
gcatgtgtgcttagaaagacgttatcatggtaccttgttct

SEQ ID NO: 221 - DNA, 41 bp, Homo sapiens
acagatattattgtagcatatatccaagctagacttcaggc

SEQ ID NO: 222 - DNA, 41 bp, Homo sapiens
agcatatatccaagctagacttcaggccttagtattatagt

SEQ ID NO: 223 - DNA, 41 bp, Homo sapiens
caagctagacttcaggccttagtattatagttcaaactctg

SEQ ID NO: 224 - DNA, 41 bp, Homo sapiens
tttaacctctacctgtatgatactcatttgttttattaaga

SEQ ID NO: 225 - DNA, 41 bp, Homo sapiens
tctggttggtgtcaatcctcacctcattgtgtttcagaaat

SEQ ID NO: 226 - DNA, 41 bp, Homo sapiens
cctaccttctccatgctaccgatgtcacaagtgatccctct

SEQ ID NO: 227 - DNA, 41 bp, Homo sapiens
ggcatgtgcccgagtaagttctagagctcacctgggggatg

SEQ ID NO: 228 - DNA, 41 bp, Homo sapiens
agcttctctcggaggtcgtggagcccaatggaagcaatatc

SEQ ID NO: 229 - DNA, 41 bp, Homo sapiens
tcaatgataatctgaccaccggcagcctctaagattctgaa

SEQ ID NO: 230 - DNA, 41 bp, Homo sapiens
gtctgaatgaggttgtctgtctctagatccaccgcagcagt

SEQ ID NO: 231 - DNA, 41 bp, Homo sapiens
ttgtcactgtccatgatggtgtgcagcctgtgggcgatggt

SEQ ID NO: 232 - DNA, 41 bp, Homo sapiens
atccgtgtcaagccctgtccccctacactcacttgtcactg

SEQ ID NO: 233 - DNA, 41 bp, Homo sapiens
taaaccttctgccatcaggtgtttcccggctgacactgtta

SEQ ID NO: 234 - DNA, 41 bp, Homo sapiens
cctcattgtgtttcagaaatcgctgctggtgctcaaaggca

SEQ ID NO: 235 - DNA, 41 bp, Homo sapiens
ttttctgtgtggtgttcacctttccagtttctatgaattcc

SEQ ID NO: 236 - DNA, 41 bp, Homo sapiens
ctcaaatgctacttttctgtgtggtgttcacctttccagtt

SEQ ID NO: 237 - DNA, 41 bp, Homo sapiens
tgtccagagtcttctgtgagtacaagggccagctctatggc

SEQ ID NO: 238 - DNA, 41 bp, Homo sapiens
taaaagggaccaagcagcattgtgctaagtttcaggaacac

SEQ ID NO: 239 - DNA, 41 bp, Homo sapiens
ttatcaggggaaggggctgagaacctttgctttcagctcat

SEQ ID NO: 240 - DNA, 41 bp, Homo sapiens
acatagctcatttccccatgcattctattacatggaatttt

SEQ ID NO: 241 - DNA, 41 bp, Homo sapiens
gggaaagagctgcatagatccctgtcagtcctatgaacaag

SEQ ID NO: 242 - DNA, 41 bp, Homo sapiens
tgtcagtcctatgaacaaggagagagaagcctcctctgatc

SEQ ID NO: 243 - DNA, 41 bp, Homo sapiens
tcctggactgcgtctggaacgaagactcttctattaatatg

SEQ ID NO: 244 - DNA, 41 bp, Homo sapiens
agaagactgaaaatcatcataggcacagaaaccaactcaac

SEQ ID NO: 245 - DNA, 41 bp, Homo sapiens
atggtacaaaggaggaaaagcggcatggggcggtgagaggg

SEQ ID NO: 246 - DNA, 41 bp, Homo sapiens
tcccagagccgacagggcctatcacagccacaagttggcct

SEQ ID NO: 247 - DNA, 41 bp, Homo sapiens
caggttcactgtttctccaacggtgtactccttcctggcca

SEQ ID NO: 248 - DNA, 41 bp, Homo sapiens
cttcctggccaagttggatagggtcaatgcctaaagataag

SEQ ID NO: 249 - DNA, 41 bp, Homo sapiens
gagcgaaccacaggctgagacccccaggctgggtcagaggc

SEQ ID NO: 250 - DNA, 41 bp, Homo sapiens
tggcctgtgggctcctgggtatgtcaacatatgactaaatg

SEQ ID NO: 251 - DNA, 41 bp, Homo sapiens
catatgactaaatggcaaagctgctgaggggaggagtgagt

SEQ ID NO: 252 - DNA, 41 bp, Homo sapiens
aaatggcaaagctgctgaggggaggagtgagtgactagcaa

SEQ ID NO: 253 - DNA, 41 bp, Homo sapiens
agaatactgccactaaccgaagactgaggggagaaggatgt

SEQ ID NO: 254 - DNA, 41 bp, Homo sapiens
agttcaggaattagatattgatttaccattccacccatggc

SEQ ID NO: 255 - DNA, 41 bp, Homo sapiens
tctatgtttcctcaaagagacacagaacccagaaagcagag

SEQ ID NO: 256 - DNA, 41 bp, Homo sapiens
gcaaggatgatgaagaatatcgaaaacaatcctattgcttg

SEQ ID NO: 257 - DNA, 41 bp, Homo sapiens
ggacataataattcctccctatcagaaagatcctcagtata

SEQ ID NO: 258 - DNA, 41 bp, Homo sapiens
attaaacaagtggataaggttgatgttgaattttctgatga

SEQ ID NO: 259 - DNA, 41 bp, Homo sapiens
accttttcccactatctcagttgatgctctattgagtgata

SEQ ID NO: 260 - DNA, 41 bp, Homo sapiens
aacctgtgttgttaatgggcaaactgtgtatattaacacta

SEQ ID NO: 261 - DNA, 41 bp, Homo sapiens
gtttaaacctgtgttgttaaagggcgaactgtgtatattaa

SEQ ID NO: 262 - DNA, 41 bp, Homo sapiens
tttgcatagaagtgaaaacgtgtagtttaaacctgtgttgt

SEQ ID NO: 263 - DNA, 41 bp, Homo sapiens
aatttgcatagaagtgaaaatgcgtagtttaaacctgtgtt

SEQ ID NO: 264 - DNA, 41 bp, Homo sapiens
tgagtactctcattttttctgcctacagtttgttttattat

SEQ ID NO: 265 - DNA, 41 bp, Homo sapiens
actgtcaatattaattcttaacttttcccactatctcaggt

SEQ ID NO: 266 - DNA, 41 bp, Homo sapiens
tgttgaattttctgatgaatcgatattagtttctttagaat

SEQ ID NO: 267 - DNA, 41 bp, Homo sapiens
caaaatcttcttccgtgaaattttcttacataaaatatatg

SEQ ID NO: 268 - DNA, 41 bp, Homo sapiens
caagaccatcaaaatcttctcccgtgaaaatttcttacata

SEQ ID NO: 269 - DNA, 41 bp, Homo sapiens
aggaattaatatagtcaaaggaaaaataatgaaatatattt

SEQ ID NO: 270 - DNA, 41 bp, Homo sapiens
attatgttaatatttcaatacatgcttcaattgaaaattat

SEQ ID NO: 271 - DNA, 41 bp, Homo sapiens
ctattaagcatcaaaaattttgccaaagaaatacttaatca

SEQ ID NO: 272 - DNA, 41 bp, Homo sapiens
cattgataaactattaagcaacaaaaatttcgccaaagaaa

SEQ ID NO: 273 - DNA, 41 bp, Homo sapiens
tctacattgataaactattaggcatcaaaaatttcgccaaa

SEQ ID NO: 274 - DNA, 41 bp, Homo sapiens
ttctacattgataaactatttagcatcaaaaatttcgccaa

SEQ ID NO: 275 - DNA, 41 bp, Homo sapiens
atccaaaaccaaagagaagccatcaaaatatttctaaattt

SEQ ID NO: 276 - DNA, 41 bp, Homo sapiens
gcctgtgagagataaatttatcccagttgataaccagtggt

SEQ ID NO: 277 - DNA, 41 bp, Homo sapiens
caaattgcctgtgagagatacatttaccccagttgataacc

SEQ ID NO: 278 - DNA, 41 bp, Homo sapiens
ttcagttacatcattctttgcgcattatagaatatttagca

SEQ ID NO: 279 - DNA, 41 bp, Homo sapiens
ggtttctgaacatcctcactgtcaacattttcagttacatc

SEQ ID NO: 280 - DNA, 41 bp, Homo sapiens
tgccacttgaagatttgcaagctgctagacagggtgagatg

SEQ ID NO: 281 - DNA, 41 bp, Homo sapiens
ttctggaaatatatgatagagatatatcaaaaagagagaga

SEQ ID NO: 282 - DNA, 41 bp, Homo sapiens
aggtaaaaggacaatgacattacagcagtaaaacatgagaa

SEQ ID NO: 283 - DNA, 41 bp, Homo sapiens
attccaacggtgttcagtttcaattttttaatgatatatcc

SEQ ID NO: 284 - DNA, 41 bp, Homo sapiens
attttactttaagttctggggtacatgtgcagaatgtgcat

SEQ ID NO: 285 - DNA, 41 bp, Homo sapiens
tcattaggtgtgtttatagtgtcatgcatatgaaaatgttt

SEQ ID NO: 286 - DNA, 41 bp, Homo sapiens
gaagcatattacccatgaacgcatatatccacatgtatgac

SEQ ID NO: 287 - DNA, 41 bp, Homo sapiens
atcaatgtaagaaagccccagtggtactatgggagtctccc

SEQ ID NO: 288 - DNA, 41 bp, Homo sapiens
gaagaatgtccttctttagcaaaatcatcaatgtaagaaag

SEQ ID NO: 289 - DNA, 41 bp, Homo sapiens
gcatgtgtgcttagaaagacattatcatggtaccttgttct

SEQ ID NO: 290 - DNA, 41 bp, Homo sapiens
acagatattattgtagcatacatccaagctagacttcaggc

SEQ ID NO: 291 - DNA, 41 bp, Homo sapiens
agcatatatccaagctagacgtcaggccttagtattatagt

SEQ ID NO: 292 - DNA, 41 bp, Homo sapiens
caagctagacttcaggccttcgtattatagttcaaactctg

SEQ ID NO: 293 - DNA, 41 bp, Homo sapiens
tttaacctctacctgtatgacactcatttgttttattaaga

SEQ ID NO: 294 - DNA, 41 bp, Homo sapiens
tctggttggtgtcaatcctctcctcattgtgtttcagaaat

SEQ ID NO: 295 - DNA, 41 bp, Homo sapiens
cctaccttctccatgctaccaatgtcacaagtgatccctct

SEQ ID NO: 296 - DNA, 41 bp, Homo sapiens
ggcatgtgcccgagtaagttgtagagctcacctgggggatg

SEQ ID NO: 297 - DNA, 41 bp, Homo sapiens
agcttctctcggaggtcgtgaagcccaatggaagcaatatc

SEQ ID NO: 298 - DNA, 41 bp, Homo sapiens
tcaatgataatctgaccaccagcagcctctaagattctgaa

SEQ ID NO: 299 - DNA, 41 bp, Homo sapiens
gtctgaatgaggttgtctgtttctagatccaccgcagcagt

SEQ ID NO: 300 - DNA, 41 bp, Homo sapiens
ttgtcactgtccatgatggtatgcagcctgtgggcgatggt

SEQ ID NO: 301 - DNA, 41 bp, Homo sapiens
atccgtgtcaagccctgtcctcctacactcacttgtcactg

SEQ ID NO: 302 - DNA, 41 bp, Homo sapiens
taaaccttctgccatcaggtatttcccggctgacactgtta

SEQ ID NO: 303 - DNA, 41 bp, Homo sapiens
cctcattgtgtttcagaaatagctgctggtgctcaaaggca

SEQ ID NO: 304 - DNA, 41 bp, Homo sapiens
ttttctgtgtggtgttcacccttccagtttctatgaattcc

SEQ ID NO: 305 - DNA, 41 bp, Homo sapiens
ctcaaatgctacttttctgtatggtgttcacctttccagtt

SEQ ID NO: 306 - DNA, 41 bp, Homo sapiens
tgtccagagtcttctgtgagcacaagggccagctctatggc

SEQ ID NO: 307 - DNA, 41 bp, Homo sapiens
taaaagggaccaagcagcatagtgctaagtttcaggaacac

SEQ ID NO: 308 - DNA, 41 bp, Homo sapiens
ttatcaggggaaggggctgaaaacctttgctttcagctcat

SEQ ID NO: 309 - DNA, 41 bp, Homo sapiens
acatagctcatttccccatgaattctattacatggaatttt

SEQ ID NO: 310 - DNA, 41 bp, Homo sapiens
gggaaagagctgcatagatctctgtcagtcctatgaacaag

SEQ ID NO: 311 - DNA, 41 bp, Homo sapiens
tgtcagtcctatgaacaaggggagagaagcctcctctgatc

SEQ ID NO: 312 - DNA, 41 bp, Homo sapiens
tcctggactgcgtctggaacaaagactcttctattaatatg

SEQ ID NO: 313 - DNA, 41 bp, Homo sapiens
agaagactgaaaatcatcatgggcacagaaaccaactcaac

SEQ ID NO: 314 - DNA, 41 bp, Homo sapiens
atggtacaaaggaggaaaagtggcatggggcggtgagaggg

SEQ ID NO: 315 - DNA, 41 bp, Homo sapiens
tcccagagccgacagggcctgtcacagccacaagttggcct

SEQ ID NO: 316 - DNA, 41 bp, Homo sapiens
caggttcactgtttctccaatggtgtactccttcctggcca

SEQ ID NO: 317 - DNA, 41 bp, Homo sapiens
cttcctggccaagttggataaggtcaatgcctaaagataag

SEQ ID NO: 318 - DNA, 41 bp, Homo sapiens
gagcgaaccacaggctgagaaccccaggctgggtcagaggc

SEQ ID NO: 319 - DNA, 41 bp, Homo sapiens
tggcctgtgggctcctgggtgtgtcaacatatgactaaatg

SEQ ID NO: 320 - DNA, 41 bp, Homo sapiens
catatgactaaatggcaaagatgctgaggggaggagtgagt

SEQ ID NO: 321 - DNA, 41 bp, Homo sapiens
aaatggcaaagctgctgaggagaggagtgagtgactagcaa

SEQ ID NO: 322 - DNA, 41 bp, Homo sapiens
agaatactgccactaaccgaggactgaggggagaaggatgt

SEQ ID NO: 323 - DNA, 41 bp, Homo sapiens
agttcaggaattagatattggtttaccattccacccatggc

SEQ ID NO: 324 - DNA, 41 bp, Homo sapiens
tctatgtttcctcaaagagagacagaacccagaaagcagag

SEQ ID NO: 325 - DNA, 41 bp, Homo sapiens
gcaaggatgatgaagaatattgaaaacaatcctattgcttg

SEQ ID NO: 326 - DNA, 41 bp, Homo sapiens
ggacataataattcctccctgtcagaaagatcctcagtata

SEQ ID NO: 327 - DNA, 21 bp, Homo sapiens
ttcagatggacaaaatttgca

SEQ ID NO: 328 - DNA, 21 bp, Homo sapiens
ttcagatggacaaaatttgca

SEQ ID NO: 329 - DNA, 21 bp, Homo sapiens
ttcagatggacaaaatttgca

SEQ ID NO: 330 - DNA, 21 bp, Homo sapiens
ttcagatggacaaaatttgca

SEQ ID NO: 331 - DNA, 21 bp, Homo sapiens
ttcagatggacaaaatttgca

SEQ ID NO: 332 - DNA, 21 bp, Homo sapiens
ttcagatggacaaaatttgca

SEQ ID NO: 333 - DNA, 21 bp, Homo sapiens
ccaagctagacttcaggcctt

SEQ ID NO: 334 - DNA, 21 bp, Homo sapiens
ttcagatggacaaaatttgca

SEQ ID NO: 335 - DNA, 21 bp, Homo sapiens
ttcagatggacaaaatttgca

SEQ ID NO: 336 - DNA, 21 bp, Homo sapiens
ggctcttctactcccagaagg

SEQ ID NO: 337 - DNA, 21 bp, Homo sapiens
ggctcttctactcccagaagg

SEQ ID NO: 338 - DNA, 24 bp, Homo sapiens
aaaatgagatacgagattgcttga

SEQ ID NO: 339 - DNA, 21 bp, Homo sapiens
cgtgatcaatccaaaaccaaa

SEQ ID NO: 340 - DNA, 21 bp, Homo sapiens
cgtgatcaatccaaaaccaaa

SEQ ID NO: 341 - DNA, 21 bp, Homo sapiens
cgtgatcaatccaaaaccaaa

SEQ ID NO: 342 - DNA, 21 bp, Homo sapiens
cgtgatcaatccaaaaccaaa

SEQ ID NO: 343 - DNA, 21 bp, Homo sapiens
cgtgatcaatccaaaaccaaa

SEQ ID NO: 344 - DNA, 21 bp, Homo sapiens
cgtgatcaatccaaaaccaaa

SEQ ID NO: 345 - DNA, 21 bp, Homo sapiens
cagggtttctgaacatcctca

SEQ ID NO: 346 - DNA, 21 bp, Homo sapiens
cagggtttctgaacatcctca

SEQ ID NO: 347 - DNA, 21 bp, Homo sapiens
cagggtttctgaacatcctca

SEQ ID NO: 348 - DNA, 21 bp, Homo sapiens
cagggtttctgaacatcctca

SEQ ID NO: 349 - DNA, 21 bp, Homo sapiens
agaaaaacctgattgtgccct

SEQ ID NO: 350 - DNA, 21 bp, Homo sapiens
agaaaaacctgattgtgccct

SEQ ID NO: 351 - DNA, 26 bp, Homo sapiens
tttgatggttaacatattatgcaatt

SEQ ID NO: 352 - DNA, 26 bp, Homo sapiens
tttgatggttaacatattatgcaatt

SEQ ID NO: 353 - DNA, 26 bp, Homo sapiens
tttgatggttaacatattatgcaatt

SEQ ID NO: 354 - DNA, 26 bp, Homo sapiens
cagccttgagagttcatagtaatttt

SEQ ID NO: 355 - DNA, 23 bp, Homo sapiens
ttttagaaaacagagatcccagg

SEQ ID NO: 356 - DNA, 23 bp, Homo sapiens
ttttagaaaacagagatcccagg

SEQ ID NO: 357 - DNA, 23 bp, Homo sapiens
ttttagaaaacagagatcccagg

SEQ ID NO: 358 - DNA, 24 bp, Homo sapiens
gcaaaggactattgaaagagtgaa

SEQ ID NO: 359 - DNA, 23 bp, Homo sapiens
tttttcctaatacattaccgtgg

SEQ ID NO: 360 - DNA, 23 bp, Homo sapiens
tttttcctaatacattaccgtgg

SEQ ID NO: 361 - DNA, 23 bp, Homo sapiens
tttttcctaatacattaccgtgg

SEQ ID NO: 362 - DNA, 21 bp, Homo sapiens
ccaagctagacttcaggcctt

SEQ ID NO: 363 - DNA, 21 bp, Homo sapiens
tagcatgacagtgtgtgtggc

SEQ ID NO: 364 - DNA, 20 bp, Homo sapiens
agggaggagctgagcagaag

SEQ ID NO: 365 - DNA, 21 bp, Homo sapiens
acgtgtccatcctagggaact

SEQ ID NO: 366 - DNA, 21 bp, Homo sapiens
acgtgtccatcctagggaact

SEQ ID NO: 367 - DNA, 21 bp, Homo sapiens
acgtgtccatcctagggaact

SEQ ID NO: 368 - DNA, 21 bp, Homo sapiens
tcatcagtaatgtggtggtgg

SEQ ID NO: 369 - DNA, 21 bp, Homo sapiens
tcatcagtaatgtggtggtgg

SEQ ID NO: 370 - DNA, 21 bp, Homo sapiens
tcatcagtaatgtggtggtgg

SEQ ID NO: 371 - DNA, 21 bp, Homo sapiens
tcatcagtaatgtggtggtgg

SEQ ID NO: 372 - DNA, 21 bp, Homo sapiens
tagcatgacagtgtgtgtggc

SEQ ID NO: 373 - DNA, 21 bp, Homo sapiens
tttcctgttcctccacacatc

SEQ ID NO: 374 - DNA, 21 bp, Homo sapiens
tttcctgttcctccacacatc

SEQ ID NO: 375 - DNA, 22 bp, Homo sapiens
tgctcaaatgaagatgaaaagc

SEQ ID NO: 376 - DNA, 21 bp, Homo sapiens
actggggctcagaaaactcat

SEQ ID NO: 377 - DNA, 21 bp, Homo sapiens
tgggatcacagctggatattc

SEQ ID NO: 378 - DNA, 21 bp, Homo sapiens
tgggatcacagctggatattc

SEQ ID NO: 379 - DNA, 21 bp, Homo sapiens
agatgaccaggggaaactgac

SEQ ID NO: 380 - DNA, 21 bp, Homo sapiens
agatgaccaggggaaactgac

SEQ ID NO: 381 - DNA, 21 bp, Homo sapiens
cctgagctttagaccaattgc

SEQ ID NO: 382 - DNA, 21 bp, Homo sapiens
gggcccatgtaaaatatggag

SEQ ID NO: 383 - DNA, 21 bp, Homo sapiens
ggggtatggtacaaaggagga

SEQ ID NO: 384 - DNA, 21 bp, Homo sapiens
ggatgtctccaagacctcacc

SEQ ID NO: 385 - DNA, 21 bp, Homo sapiens
aaagtcttccaccagctttgc

SEQ ID NO: 386 - DNA, 21 bp, Homo sapiens
aaagtcttccaccagctttgc

SEQ ID NO: 387 - DNA, 21 bp, Homo sapiens
gtaaggacagaatcgccatga

SEQ ID NO: 388 - DNA, 21 bp, Homo sapiens
acttcagcttcagacagtggc

SEQ ID NO: 389 - DNA, 21 bp, Homo sapiens
acttcagcttcagacagtggc

SEQ ID NO: 390 - DNA, 21 bp, Homo sapiens
acttcagcttcagacagtggc

SEQ ID NO: 391 - DNA, 22 bp, Homo sapiens
gaacaggcaggagtaggctaga

SEQ ID NO: 392 - DNA, 21 bp, Homo sapiens
gcccaggcatagagtttcaat

SEQ ID NO: 393 - DNA, 21 bp, Homo sapiens
gcccaggcatagagtttcaat

SEQ ID NO: 394 - DNA, 21 bp, Homo sapiens
gatggaagcagttttgtcagc

SEQ ID NO: 395 - DNA, 21 bp, Homo sapiens
ggagctcacagcaggtactca

SEQ ID NO: 396 - DNA, 21 bp, Homo sapiens
aaaacacatgctgggaaattg

SEQ ID NO: 397 - DNA, 21 bp, Homo sapiens
aaaacacatgctgggaaattg

SEQ ID NO: 398 - DNA, 21 bp, Homo sapiens
aaaacacatgctgggaaattg

SEQ ID NO: 399 - DNA, 21 bp, Homo sapiens
aaaacacatgctgggaaattg

SEQ ID NO: 400 - DNA, 21 bp, Homo sapiens
aaaacacatgctgggaaattg

SEQ ID NO: 401 - DNA, 21 bp, Homo sapiens
aaaacacatgctgggaaattg

SEQ ID NO: 402 - DNA, 21 bp, Homo sapiens
ctggggcagatagtgaaacac

SEQ ID NO: 403 - DNA, 21 bp, Homo sapiens
aaaacacatgctgggaaattg

SEQ ID NO: 404 - DNA, 21 bp, Homo sapiens
aaaacacatgctgggaaattg

SEQ ID NO: 405 - DNA, 30 bp, Homo sapiens
tgtgagaattctgagaaatataatctttaa

SEQ ID NO: 406 - DNA, 30 bp, Homo sapiens; identical to SEQ ID NO: 405

SEQ ID NO: 407 - DNA, 21 bp, Homo sapiens
ttgggtagatgcagaacaaaa

SEQ ID NO: 408 - DNA, 22 bp, Homo sapiens
tgatgatcttgtggcttttctt

SEQ ID NO: 409 - DNA, 22 bp, Homo sapiens
tgatgatcttgtggcttttctt

SEQ ID NO: 410 - DNA, 22 bp, Homo sapiens
tgatgatcttgtggcttttctt

SEQ ID NO: 411 - DNA, 22 bp, Homo sapiens
tgatgatcttgtggcttttctt

SEQ ID NO: 412 - DNA, 22 bp, Homo sapiens
tgatgatcttgtggcttttctt

SEQ ID NO: 413 - DNA, 22 bp, Homo sapiens
tgatgatcttgtggcttttctt

SEQ ID NO: 414 - DNA, 21 bp, Homo sapiens
ccccctttccttctgattttt

SEQ ID NO: 415 - DNA, 21 bp, Homo sapiens
ccccctttccttctgattttt

SEQ ID NO: 416 - DNA, 21 bp, Homo sapiens
ccccctttccttctgattttt

SEQ ID NO: 417 - DNA, 21 bp, Homo sapiens
ccccctttccttctgattttt

SEQ ID NO: 418 - DNA, 21 bp, Homo sapiens
ttccctctttctctgctttca

SEQ ID NO: 419 - DNA, 21 bp, Homo sapiens
ttccctctttctctgctttca

SEQ ID NO: 420 - DNA, 21 bp, Homo sapiens
catgcacattctgcacatgta

SEQ ID NO: 421 - DNA, 21 bp, Homo sapiens
catgcacattctgcacatgta

SEQ ID NO: 422 - DNA, 21 bp, Homo sapiens
catgcacattctgcacatgta

SEQ ID NO: 423 - DNA, 25 bp, Homo sapiens
tttgaacaagtgagacttcactaaa

SEQ ID NO: 424 - DNA, 30 bp, Homo sapiens
tgtttaaaatgaaacactctcttatctaca

SEQ ID NO: 425 - DNA, 30 bp, Homo sapiens; identical to SEQ ID NO: 424

SEQ ID NO: 426 - DNA, 30 bp, Homo sapiens; identical to SEQ ID NO: 424

SEQ ID NO: 427 - DNA, 26 bp, Homo sapiens
catatttcttttaaaaacatggtgaa

SEQ ID NO: 428 - DNA, 24 bp, Homo sapiens
aaagtgagagacatggttactgtg

SEQ ID NO: 429 - DNA, 24 bp, Homo sapiens
aaagtgagagacatggttactgtg

SEQ ID NO: 430 - DNA, 24 bp, Homo sapiens
aaagtgagagacatggttactgtg

SEQ ID NO: 431 - DNA, 21 bp, Homo sapiens
ctggggcagatagtgaaacac

SEQ ID NO: 432 - DNA, 21 bp, Homo sapiens
gcaggcttttgtcttgttcag

SEQ ID NO: 433 - DNA, 21 bp, Homo sapiens
ttctatgacacgagtcctggg

SEQ ID NO: 434 - DNA, 21 bp, Homo sapiens
tcctcaccaaaaccaaaatca

SEQ ID NO: 435 - DNA, 21 bp, Homo sapiens
tcctcaccaaaaccaaaatca

SEQ ID NO: 436 - DNA, 21 bp, Homo sapiens
tcctcaccaaaaccaaaatca

SEQ ID NO: 437 - DNA, 21 bp, Homo sapiens
gggggttttgaaagtctgatc

SEQ ID NO: 438 - DNA, 21 bp, Homo sapiens
gggggttttgaaagtctgatc

SEQ ID NO: 439 - DNA, 21 bp, Homo sapiens
gggggttttgaaagtctgatc

SEQ ID NO: 440 - DNA, 21 bp, Homo sapiens
gggggttttgaaagtctgatc

SEQ ID NO: 441 - DNA, 21 bp, Homo sapiens
gcaggcttttgtcttgttcag

SEQ ID NO: 442 - DNA, 21 bp, Homo sapiens
caagaagacccttgggaattg

SEQ ID NO: 443 - DNA, 21 bp, Homo sapiens
caagaagacccttgggaattg

SEQ ID NO: 444 - DNA, 24 bp, Homo sapiens
tgtatgtatccattctttccagaa

SEQ ID NO: 445 - DNA, 21 bp, Homo sapiens
aggcgccttcaactctgatat

SEQ ID NO: 446 - DNA, 21 bp, Homo sapiens
acctcctgttagcgtaggagc

SEQ ID NO: 447 - DNA, 21 bp, Homo sapiens
acctcctgttagcgtaggagc

SEQ ID NO: 448 - DNA, 22 bp, Homo sapiens
catgctgtatgtacatctggga

SEQ ID NO: 449 - DNA, 22 bp, Homo sapiens
catgctgtatgtacatctggga

SEQ ID NO: 450 - DNA, 21 bp, Homo sapiens
gccagctctgttgacatcttt

SEQ ID NO: 451 - DNA, 21 bp, Homo sapiens
tgccagactctcaaattccag

SEQ ID NO: 452 - DNA, 21 bp, Homo sapiens
agatacacctggtgccctttc

SEQ ID NO: 453 - DNA, 21 bp, Homo sapiens
aggggaaatctcctgatacca

SEQ ID NO: 454 - DNA, 21 bp, Homo sapiens
tgtccatgggtcctaatttca

SEQ ID NO: 455 - DNA, 21 bp, Homo sapiens
tgtccatgggtcctaatttca

SEQ ID NO: 456 - DNA, 21 bp, Homo sapiens
cccactcctctgtcaagttca

SEQ ID NO: 457 - DNA, 21 bp, Homo sapiens
atgcagcctattgcaaatgaa

SEQ ID NO: 458 - DNA, 21 bp, Homo sapiens
atgcagcctattgcaaatgaa

SEQ ID NO: 459 - DNA, 21 bp, Homo sapiens
atgcagcctattgcaaatgaa

SEQ ID NO: 460 - DNA, 21 bp, Homo sapiens
cctcctttcttcccatgttct

SEQ ID NO: 461 - DNA, 21 bp, Homo sapiens
gatataaaggtggggtgggag

SEQ ID NO: 462 - DNA, 21 bp, Homo sapiens
gatataaaggtggggtgggag

SEQ ID NO: 463 - DNA, 21 bp, Homo sapiens
ttttgctacctgctacccatg

SEQ ID NO: 464 - DNA, 21 bp, Homo sapiens
tatgtcctgggcacaagtctt

SEQ ID NO: 465 - DNA, 21 bp, Homo sapiens
ctgtgttgttaatgggcgaac

SEQ ID NO: 466 - DNA, 21 bp, Homo sapiens
ctgtgttgttaatgggcgaac

SEQ ID NO: 467 - DNA, 21 bp, Homo sapiens
ctgtgttgttaatgggcgaac

SEQ ID NO: 468 - DNA, 21 bp, Homo sapiens
ctgtgttgttaatgggcgaac

SEQ ID NO: 469 - DNA, 21 bp, Homo sapiens
ctgtgttgttaatgggcgaac

SEQ ID NO: 470 - DNA, 21 bp, Homo sapiens
ctgtgttgttaatgggcgaac

SEQ ID NO: 471 - DNA, 24 bp, Homo sapiens
ttcaaactctgtgtttgtttgttt

SEQ ID NO: 472 - DNA, 21 bp, Homo sapiens
ctgtgttgttaatgggcgaac

SEQ ID NO: 473 - DNA, 21 bp, Homo sapiens
ctgtgttgttaatgggcgaac

SEQ ID NO: 474 - DNA, 21 bp, Homo sapiens
aagggctcagaatgtaagcgt

SEQ ID NO: 475 - DNA, 21 bp, Homo sapiens
aagggctcagaatgtaagcgt

SEQ ID NO: 476 - DNA, 21 bp, Homo sapiens
ccatactgcatgcaaagtcag

SEQ ID NO: 477 - DNA, 21 bp, Homo sapiens
catcaaaaatttcgccaaaga

SEQ ID NO: 478 - DNA, 21 bp, Homo sapiens
catcaaaaatttcgccaaaga

SEQ ID NO: 479 - DNA, 21 bp, Homo sapiens
catcaaaaatttcgccaaaga

SEQ ID NO: 480 - DNA, 21 bp, Homo sapiens
catcaaaaatttcgccaaaga

SEQ ID NO: 481 - DNA, 21 bp, Homo sapiens
catcaaaaatttcgccaaaga

SEQ ID NO: 482 - DNA, 21 bp, Homo sapiens
catcaaaaatttcgccaaaga

SEQ ID NO: 483 - DNA, 21 bp, Homo sapiens
gcagtacccctgacctctacc

SEQ ID NO: 484 - DNA, 21 bp, Homo sapiens
gcagtacccctgacctctacc

SEQ ID NO: 485 - DNA, 21 bp, Homo sapiens
gcagtacccctgacctctacc

SEQ ID NO: 486 - DNA, 21 bp, Homo sapiens
gcagtacccctgacctctacc

SEQ ID NO: 487 - DNA, 22 bp, Homo sapiens
catcacacccatcacaataaca

SEQ ID NO: 488 - DNA, 22 bp, Homo sapiens
catcacacccatcacaataaca

SEQ ID NO: 489 - DNA, 26 bp, Homo sapiens
tttgatggttaacatattatgcaatt

SEQ ID NO: 490 - DNA, 26 bp, Homo sapiens
tttgatggttaacatattatgcaatt

SEQ ID NO: 491 - DNA, 26 bp, Homo sapiens
tttgatggttaacatattatgcaatt

SEQ ID NO: 492 - DNA, 24 bp, Homo sapiens
tgaaatatgaatttgaattcccag

SEQ ID NO: 493 - DNA, 21 bp, Homo sapiens
gtaaagccaatgattggacca

SEQ ID NO: 494 - DNA, 21 bp, Homo sapiens
gtaaagccaatgattggacca

SEQ ID NO: 495 - DNA, 21 bp, Homo sapiens
gtaaagccaatgattggacca

SEQ ID NO: 496 - DNA, 21 bp, Homo sapiens
tgtttttcgcatgtgtgctta

SEQ ID NO: 497 - DNA, 21 bp, Homo sapiens
gcccactggaaacttaacaca

SEQ ID NO: 498 - DNA, 21 bp, Homo sapiens
gcccactggaaacttaacaca

SEQ ID NO: 499 - DNA, 21 bp, Homo sapiens
gcccactggaaacttaacaca

SEQ ID NO: 500 - DNA, 24 bp, Homo sapiens
ttcaaactctgtgtttgtttgttt

SEQ ID NO: 501 - DNA, 21 bp, Homo sapiens
atttcacaccactagccatgc

SEQ ID NO: 502 - DNA, 21 bp, Homo sapiens
acagctgcggtaagtctgtgt

SEQ ID NO: 503 - DNA, 21 bp, Homo sapiens
tggaattgacagtgctgactg

SEQ ID NO: 504 - DNA, 21 bp, Homo sapiens
tggaattgacagtgctgactg

SEQ ID NO: 505 - DNA, 21 bp, Homo sapiens
tggaattgacagtgctgactg

SEQ ID NO: 506 - DNA, 21 bp, Homo sapiens
taaaccttctgccatcaggtg

SEQ ID NO: 507 - DNA, 21 bp, Homo sapiens
taaaccttctgccatcaggtg

SEQ ID NO: 508 - DNA, 21 bp, Homo sapiens
taaaccttctgccatcaggtg

SEQ ID NO: 509 - DNA, 21 bp, Homo sapiens
taaaccttctgccatcaggtg

SEQ ID NO: 510 - DNA, 21 bp, Homo sapiens
atttcacaccactagccatgc

SEQ ID NO: 511 - DNA, 21 bp, Homo sapiens
ggatgaggacattcacaggaa

SEQ ID NO: 512 - DNA, 21 bp, Homo sapiens
ggatgaggacattcacaggaa

SEQ ID NO: 513 - DNA, 21 bp, Homo sapiens
aaatttgtttcaccccattcc

SEQ ID NO: 514 - DNA, 21 bp, Homo sapiens
gtcaaaccattggtctccaga

SEQ ID NO: 515 - DNA, 21 bp, Homo sapiens
atggcaaatgcagttatcagg

SEQ ID NO: 516 - DNA, 21 bp, Homo sapiens
atggcaaatgcagttatcagg

SEQ ID NO: 517 - DNA, 21 bp, Homo sapiens
aaggaagagcttggagtgtcc

SEQ ID NO: 518 - DNA, 21 bp, Homo sapiens
aaggaagagcttggagtgtcc

SEQ ID NO: 519 - DNA, 21 bp, Homo sapiens
ttctggttcttgttggtgacc

SEQ ID NO: 520 - DNA, 21 bp, Homo sapiens
gatgcactctcgaaggagttg

SEQ ID NO: 521 - DNA, 21 bp, Homo sapiens
ggcctagagatgccagctagt

SEQ ID NO: 522 - DNA, 21 bp, Homo sapiens
actagccctcagtgccttctc

SEQ ID NO: 523 - DNA, 21 bp, Homo sapiens
gcccaaactcccattaagaat

SEQ ID NO: 524 - DNA, 21 bp, Homo sapiens
gcccaaactcccattaagaat

SEQ ID NO: 525 - DNA, 21 bp, Homo sapiens
tgatgtacccttgcctgaaac

SEQ ID NO: 526 - DNA, 21 bp, Homo sapiens
actaaatggcaaagctgctga

SEQ ID NO: 527 - DNA, 21 bp, Homo sapiens
actaaatggcaaagctgctga

SEQ ID NO: 528 - DNA, 21 bp, Homo sapiens
actaaatggcaaagctgctga

SEQ ID NO: 529 - DNA, 21 bp, Homo sapiens
gccttttgtccaaaggaagtc

SEQ ID NO: 530 - DNA, 21 bp, Homo sapiens
cacagaacccagaaagcagag

SEQ ID NO: 531 - DNA, 21 bp, Homo sapiens
cacagaacccagaaagcagag

SEQ ID NO: 532 - DNA, 21 bp, Homo sapiens
acttgtgcccaggacataatg

SEQ ID NO: 533 - DNA, 21 bp, Homo sapiens
tgaacagtgttgtctaggggg

SEQ ID NO: 534 - DNA, 21 bp, Homo sapiens
atggtgcaaataaaggggaat

SEQ ID NO: 535 - DNA, 21 bp, Homo sapiens
atggtgcaaataaaggggaat

SEQ ID NO: 536 - DNA, 21 bp, Homo sapiens
atggtgcaaataaaggggaat

SEQ ID NO: 537 - DNA, 21 bp, Homo sapiens
atggtgcaaataaaggggaat

SEQ ID NO: 538 - DNA, 21 bp, Homo sapiens
atggtgcaaataaaggggaat

SEQ ID NO: 539 - DNA, 21 bp, Homo sapiens
atggtgcaaataaaggggaat

SEQ ID NO: 540 - DNA, 21 bp, Homo sapiens
gtttccaaacagcattgcatt

SEQ ID NO: 541 - DNA, 21 bp, Homo sapiens
atggtgcaaataaaggggaat

SEQ ID NO: 542 - DNA, 21 bp, Homo sapiens
atggtgcaaataaaggggaat

SEQ ID NO: 543 - DNA, 21 bp, Homo sapiens
tggcaactggagtgaactctt

SEQ ID NO: 544 - DNA, 21 bp, Homo sapiens
tggcaactggagtgaactctt

SEQ ID NO: 545 - DNA, 22 bp, Homo sapiens
cgaatcctccaaatttttgaac

SEQ ID NO: 546 - DNA, 22 bp, Homo sapiens
aggtgattgtttcaaactgagc

SEQ ID NO: 547 - DNA, 22 bp, Homo sapiens
aggtgattgtttcaaactgagc

SEQ ID NO: 548 - DNA, 22 bp, Homo sapiens
aggtgattgtttcaaactgagc

SEQ ID NO: 549 - DNA, 22 bp, Homo sapiens
aggtgattgtttcaaactgagc

SEQ ID NO: 550 - DNA, 22 bp, Homo sapiens
aggtgattgtttcaaactgagc

SEQ ID NO: 551 - DNA, 22 bp, Homo sapiens
aggtgattgtttcaaactgagc

SEQ ID NO: 552 - DNA, 21 bp, Homo sapiens
gatgttcttggcagctctgtc

SEQ ID NO: 553 - DNA, 21 bp, Homo sapiens
gatgttcttggcagctctgtc

SEQ ID NO: 554 - DNA, 21 bp, Homo sapiens
gatgttcttggcagctctgtc

SEQ ID NO: 555 - DNA, 21 bp, Homo sapiens
gatgttcttggcagctctgtc

SEQ ID NO: 556 - DNA, 21 bp, Homo sapiens
cttcttccttctcctcccctt

SEQ ID NO: 557 - DNA, 21 bp, Homo sapiens
cttcttccttctcctcccctt

SEQ ID NO: 558 - DNA, 21 bp, Homo sapiens
catgcacattctgcacatgta

SEQ ID NO: 559 - DNA, 21 bp, Homo sapiens
catgcacattctgcacatgta

SEQ ID NO: 560 - DNA, 21 bp, Homo sapiens
catgcacattctgcacatgta

SEQ ID NO: 561 - DNA, 21 bp, Homo sapiens
tgcaatgtatttgcagcactg

SEQ ID NO: 562 - DNA, 21 bp, Homo sapiens
ggttgtttaaaggaatctggg

SEQ ID NO: 563 - DNA, 21 bp, Homo sapiens
ggttgtttaaaggaatctggg

SEQ ID NO: 564 - DNA, 21 bp, Homo sapiens
ggttgtttaaaggaatctggg

SEQ ID NO: 565 - DNA, 21 bp, Homo sapiens
taagaaccatgcattcttggc

SEQ ID NO: 566 - DNA, 28 bp, Homo sapiens
aaacaaatgagtatcatacaggtagagg

SEQ ID NO: 567 - DNA, 28 bp, Homo sapiens
aaacaaatgagtatcatacaggtagagg

SEQ ID NO: 568 - DNA, 28 bp, Homo sapiens
aaacaaatgagtatcatacaggtagagg

SEQ ID NO: 569 - DNA, 21 bp, Homo sapiens
gtttccaaacagcattgcatt

SEQ ID NO: 570 - DNA, 21 bp, Homo sapiens
agaaaggaggaagatggtgga

SEQ ID NO: 571 - DNA, 21 bp, Homo sapiens
ctcatcttgtctccttgccag

SEQ ID NO: 572 - DNA, 21 bp, Homo sapiens
cactgcctcttacctcctgtg

SEQ ID NO: 573 - DNA, 21 bp, Homo sapiens
cactgcctcttacctcctgtg

SEQ ID NO: 574 - DNA, 21 bp, Homo sapiens
cactgcctcttacctcctgtg

SEQ ID NO: 575 - DNA, 21 bp, Homo sapiens
tgcgtctttccttggtcttta

SEQ ID NO: 576 - DNA, 21 bp, Homo sapiens
tgcgtctttccttggtcttta

SEQ ID NO: 577 - DNA, 21 bp, Homo sapiens
tgcgtctttccttggtcttta

SEQ ID NO: 578 - DNA, 21 bp, Homo sapiens
tgcgtctttccttggtcttta

SEQ ID NO: 579 - DNA, 21 bp, Homo sapiens
agaaaggaggaagatggtgga

SEQ ID NO: 580 - DNA, 21 bp, Homo sapiens
cagttctaggtccaatggcag

SEQ ID NO: 581 - DNA, 21 bp, Homo sapiens
cagttctaggtccaatggcag

SEQ ID NO: 582 - DNA, 21 bp, Homo sapiens
tcactgcataccgtttttcct

SEQ ID NO: 583 - DNA, 21 bp, Homo sapiens
tgcttggtcccttttaggaat

SEQ ID NO: 584 - DNA, 21 bp, Homo sapiens
atggagaaagcggagagagac

SEQ ID NO: 585 - DNA, 21 bp, Homo sapiens
atggagaaagcggagagagac

SEQ ID NO: 586 - DNA, 21 bp, Homo sapiens
cttgctgaaaccagcaagatc

SEQ ID NO: 587 - DNA, 21 bp, Homo sapiens
cttgctgaaaccagcaagatc

SEQ ID NO: 588 - DNA, 21 bp, Homo sapiens
ggcctcttgtactttgggaac

SEQ ID NO: 589 - DNA, 21 bp, Homo sapiens
cgcgtgagcacctaattagtc

SEQ ID NO: 590 - DNA, 21 bp, Homo sapiens
gggcaatcatgtgagctgtat

SEQ ID NO: 591 - DNA, 21 bp, Homo sapiens
acccctgctatctccttcaaa

SEQ ID NO: 592 - DNA, 21 bp, Homo sapiens
aggcattgaccctatccaact

SEQ ID NO: 593 - DNA, 21 bp, Homo sapiens
aggcattgaccctatccaact

SEQ ID NO: 594 - DNA, 21 bp, Homo sapiens
ctgtccctctatcccagaacc

SEQ ID NO: 595 - DNA, 21 bp, Homo sapiens
actgggaacacacagaatcca

SEQ ID NO: 596 - DNA, 21 bp, Homo sapiens
actgggaacacacagaatcca

SEQ ID NO: 597 - DNA, 21 bp, Homo sapiens
actgggaacacacagaatcca

SEQ ID NO: 598 - DNA, 21 bp, Homo sapiens
gacatccttctcccctcagtc

SEQ ID NO: 599 - DNA, 21 bp, Homo sapiens
tggcaagtaagacagggaaga

SEQ ID NO: 600 - DNA, 21 bp, Homo sapiens
tggcaagtaagacagggaaga

SEQ ID NO: 601 - DNA, 21 bp, Homo sapiens
ctccttgtggttggcattcta

SEQ ID NO: 602 - DNA, 21 bp, Homo sapiens
gctgacaaaactgcttccatc

SEQ ID NO: 603 - DNA, 5300 bp, Homo sapiens
  misc_feature (3664)..(3664): wherein "n" is either A or T.
  misc_feature (3643)..(3643): wherein "n" is either G or T.
  misc_feature (2983)..(2983): wherein "n" is either A or G.
  misc_feature (2110)..(2110): wherein "n" is either T or C.
  misc_feature (1350)..(1350): wherein "n" is either G or A.
  misc_feature (1320)..(1320): wherein "n" is either C or T.
  misc_feature (3035)..(3035): wherein "n" is either G or A.
  misc_feature (359)..(359): wherein "n" is either A or G.
  misc_feature (4589)..(4589): wherein "n" is either T or C.
  misc_feature (4511)..(4511): wherein "n" is either G or A.
  misc_feature (4163)..(4163): wherein "n" is either C or T.
  misc_feature (4211)..(4211): wherein "n" is either C or T.
  misc_feature (4073)..(4073): wherein "n" is either C or T.
aggataattcctgttccactttctttgatgaaacaagtaaagaagaaacaacacaatcatattaatagaagagtcttcgttccagacgcagtccaggaatcatgctggagaagttctgcaactctactttttggaattcctcattcctggacagtccggaggcagacctgccactttgttttgagcaaactgttctggtgtggattcccttgggcttcctatggctcctggccccctggcagcttctccacgtgtataaatccaggaccaagagatcctctaccaccaaactctatcttgctaagcaggtattcgttggttttcttcttattctagcagccatagagctggcccttgtnctcacagaagactctggacaagccacagtccctgctgttcgatataccaatccaagcctctacctaggcacatggctcctggttttgctgatccaatacagcagacaatggtgtgtacagaaaaactcctggttcctgtccctattctggattctctcgatactctgtggcactttccaatttcagactctgatccggacactcttacagggtgacaattctaatctagcctactcctgcctgttcttcatctcctacggattccagatcctgatcctgatcttttcagcattttcagaaaataatgagtcatcaaataatccatcatccatagcttcattcctgagtagcattacctacagctggtatgacagcatcattctgaaaggctacaagcgtcctctgacactcgaggatgtctgggaagttgatgaagagatgaaaaccaagacattagtgagcaagtttgaaacgcacatgaagagagagctgcagaaagccaggcgggcactccagagacggcaggagaagagctcccagcagaactctggagccaggctgcctggcttgaacaagaatcagagtcaaagccaagatgcccttgtcctggaagatgttgaaaagaaaaaaaagaagtctgggaccaaaaaagatgttccaaaatcctggttgatgaaggctctgttcaaaactttctacatggtgctcctgaaatcattcctactgaagctagtgaatgacatcttcacgtttgtgagtcctcagctgctgaaattgctgatctcctttgcaagtgaccgtgacacatatttgtggattggatatctctgtgcaatcctcttattcactgcggctctcattcagtctttctgccttcagtgttatttccaactgtgcttcaagctgggtgtaaaagtacggacagctatcatggcttctgtatataagaaggcattgaccntatccaacttggccaggaaggagtacaccnttggagaaacagtgaacctgatgtctgtggatgcccagaagctcatggatgtgaccaacttcatgcacatgctgtggtcaagtgttctacagattgtcttatctatcttcttcctatggagagagttgggaccctcagtcttagcaggtgttggggtgatggtgcttgtaatcccaattaatgcgatactgtccaccaagagtaagaccattcaggtcaaaaatatgaagaataaagacaaacgtttaaagatcatgaatgagattcttagtggaatcaagatcctgaaatattttgcctgggaaccttcattcagagaccaagtacaaaacctccggaagaaagagctcaagaacctgctggcctttagtcaactacagtgtgtagtaatattcgtcttccagttaactccagtcctggtatctgtggtcacattttctgtttatgtcctggtggatagcaacaatattttggatgcacaaaaggccttcacctccattaccctcttcaatatcctgcgctttcccctgagcatgcttcccatgatgatctcctccatgctccaggccagtgtttccacagagcggctagagaagtacttgggaggggatgacttggacacatctgccattcgacatgactgcaattttgacaaagccatgcagttttctgaggcctcctttacctgggaacatgattcggaagccacagtccgagatgtgaacctggacattatggcaggccaacttgtggctgtganaggccctgtcggctctgggaaatcctccttgatatcagccatgctgggagaaatggaaaatgtccacgggcacatcaccatcaagggcaccactgcctatgtcccacagcagtcctggattcagaatggcaccataaaggacaacatcctttttggaacagagtttaatgaaaagaggtaccagcaagtactggaggcctgtgctctcctcccagacttggaaatgctgcctggaggagatttggctgagattggagagaagggtataaatcttagtgggggtcagaagcagcggatcagcctggccagagctacctaccaaaatttagacatctatcttctagatgaccccctgtctgcagtggatgctcatgtaggaaaacatatttttaataaggtcttgggccccaatggcctgttgaaaggcaagactcgactcttggttacacatagcatgcactttcttcctcaagtggatgagattgtagttctggggaatggaacaattgtagagaaaggatcctacagtgctctcctggccaaaaaaggagagtttgctaagaatctgaagacatttctaagacatacaggccctgaagaggaagccacagtccatgatggcagtgaagaagaagacgatgactatgggctgatatccagtgtggaagagatccccgaagatgcagcctccataaccatgagaagagagaacagctttcgtcgaacacttagccgcagttctaggtccaatggcaggcatctgaagtccctgagaaactccttgaaaactcggaatgtgaatagcctgaaggaagacgaagaactagtgaaaggacaaaaactaattaagaaggaattcatagaaactggaanggtgaagttctccatctacctggagtacctacaagcaataggattgttttcnatattcttcatcatccttgcgtttgtgatgaattctgtggcttttattggatccaacctctggctcagtgcttggaccagtgactctaaaatcttcaatagcaccgactatccagcatctcagagggacatgagagttggagtctacggagctctgggattagcccaaggtatatttgtgttcatagcacatttctggagtgcctttggtttcgtccatgcatcaaatatcttgcacaagcaactgctgaacaatatccttcgagcacctatgagattttttgacacaacacccacaggccggattgtgaacaggtttgccggcgatatttccacagtggatgacaccctgcctcagtccttgcgcagctggattacatgcttcctggggataatcagcacccttgtcatgatctgcatggccactcctgtcttcaccatcatcgtcattcctcttggcattatttatgtatctgttcagatgttttatgtgtctacctcccgccagctgaggcgtctggactctgtcaccaggtccccaatctactctcacttcagcgagaccgtatcaggtttgccagttatccgtgcctttgagcaccagcagcnatttctgaaacacaatgaggngaggattgacaccaaccagaaatgtgtcttttcctggatcacctccaacaggtggcttgcaattcgcctggagctggttgggaacctgactgtcttcttttcagccttgatgatggttatttatagagataccctaagtggggacactgttggctttgttctgtccaatgcactcaatatcacacaaaccctgaactggctggtgaggatgacatcagaaatagagaccaacattgtggctgttgagcgaataactgagtacacaaaagtggaaaatgaggcaccctgggtgactgataagaggcctccgccagattggcccagcaaaggcaagatccagtttaacaactaccaagtgcggtaccgacctgagctggatctggtcctcagagggatcacttgtgacatnggtagcatggagaagattggtgtggtgggcaggacaggagctggaaagtcatccctcacaaactgcctcttcagaatcttagaggctgcnggtggtcagattatcattgatggagtagatattgcttccattgggctncacgacctccgagagaagctgaccatcatcccccaggaccccatcctgttctctggaagcctgaggatgaatctcgaccctttcaacaactactcagatgaggagatttggaaggccttggagctggctcacctcaagtcttttgtggccagcctgcaacttgggttatcccacgaagttacagaggctggtggcaacctgagcataggccagaggcagctgctgtgcctgggcagggctctgcttcggaaatccaagatcctggtcctggatgaggccactgctgcggtggatctaganacagacaacctcattcagacgaccatccaaaacgagttcgcccactgcacagtgatcaccatcgcccacaggctgcanaccatcatggacagtgacaaggtaatggtcctagacaacgggaagattatagagtacggcagccctgaagaactgctacaaatccctggacccttttactttatggctaaggaagctggcattgagaatgtgaacagcacaaaattctagcagaaggccccatgggttagaaaaggactataagaataatttcttatttaattttattttttataaaatacagaatacatacaaaagtgtgtataaaatgtacgttttaaaaaaggataagtgaacacccatgaacctactacccaggttaagaaaataaatgtcaccaggtacttgagaaacccctcgattgtctacctcgatcgtacttccttgctacccacccctcccagggacaaccactgtcctgaatttcacgataattattcctttgcctttcatttctgttttatcacctttgtatgtatctttaaacaacatatacccttttttacttatgtaaatggactgactcatactgcatacatcttctatgacttgattcttttgttcaatattatatctgagattcatccatggtgatgcaaataggtgcattattttttttcactgctctgtagtctggcattgtatgaatacagcacaatgtatcagttttaatattggggatcattagcattattctcaggtttttaaaaattataagcagtactactatgg

SEQ ID NO: 604 - protein, 1545 aa, Homo sapiens
  misc_feature (1188)..(1188): wherein "X" is either E or V.
  misc_feature (1181)..(1181): wherein "X" is either R or L.
  misc_feature (961)..(961): wherein "X" is either K or R.
  misc_feature (670)..(670): wherein "X" is either I or T.
  misc_feature (417)..(417): wherein "X" is either V or I.
  misc_feature (407)..(407): wherein "X" is either L or K.
MLEKFCNSTFWNSSFLDSPEADLPLCFEQTVLVWIPLGFLWLLAPWQLLHVYKSRTKRSSTTKLYLAKQVFVGFLLILAAIELALVLTEDSGQATVPAVRYTNPSLYLGTWLLVLLIQYSRQWCVQKNSWFLSLFWILSILCGTFQFQTLIRTLLQGDNSNLAYSCLFFISYGFQILILIFSAFSENNESSNNPSSIASFLSSITYSWYDSIILKGYKRPLTLEDVWEVDEEMKTKTLVSKFETHMKRELQKARRALQRRQEKSSQQNSGARLPGLNKNQSQSQDALVLEDVEKKKKKSGTKKDVPKSWLMKALFKTFYMVLLKSFLLKLVNDIFTFVSPQLLKLLISFASDRDTYLWIGYLCAILLFTAALIQSFCLQCYFQLCFKLGVKVRTAIMASVYKKALTXSNLARKEYTXGETVNLMSVDAQKLMDVTNFMHMLWSSVLQIVLSIFFLWRELGPSVLAGVGVMVLVIPINAILSTKSKTIQVKNMKNKDKRLKIMNEILSGIKILKYFAWEPSFRDQVQNLRKKELKNLLAFSQLQCVVIFVFQLTPVLVSVVTFSVYVLVDSNNILDAQKAFTSITLFNILRFPLSMLPMMISSMLQASVSTERLEKYLGGDDLDTSAIRHDCNFDKAMQFSEASFTWEHDSEATVRDVNLDIMAGQLVAVXGPVGSGKSSLISAMLGEMENVHGHITIKGTTAYVPQQSWIQNGTIKDNILFGTEFNEKRYQQVLEACALLPDLEMLPGGDLAEIGEKGINLSGGQKQRISLARATYQNLDIYLLDDPLSAVDAHVGKHIFNKVLGPNGLLKGKTRLLVTHSMHFLPQVDEIVVLGNGTIVEKGSYSALLAKKGEFAKNLKTFLRHTGPEEEATVHDGSEEEDDDYGLISSVEEIPEDAASITMRRENSFRRTLSRSSRSNGRHLKSLRNSLKTRNVNSLKEDEELVKGQKLIKKEFIETGXVKFSIYLEYLQAIGLFSIFFIILAFVMNSVAFIGSNLWLSAWTSDSKIFNSTDYPASQRDMRVGVYGALGLAQGIFVFIAHFWSAFGFVHASNILHKQLLNNILRAPMRFFDTTPTGRIVNRFAGDISTVDDTLPQSLRSWITCFLGIISTLVMICMATPVFTIIVIPLGIIYVSVQMFYVSTSRQLRRLDSVTRSPIYSHFSETVSGLPVIRAFEHQQXFLKHNEXRIDTNQKCVFSWITSNRWLAIRLELVGNLTVFFSALMMVIYRDTLSGDTVGFVLSNALNITQTLNWLVRMTSEIETNIVAVERITEYTKVENEAPWVTDKRPPPDWPSKGKIQFNNYQVRYRPELDLVLRGITCDIGSMEKIGVVGRTGAGKSSLTNCLFRILEAAGGQIIIDGVDIASIGLHDLREKLTIIPQDPILFSGSLRMNLDPFNNYSDEEIWKALELAHLKSFVASLQLGLSHEVTEAGGNLSIGQRQLLCLGRALLRKSKILVLDEATAAVDLETDNLIQTTIQNEFAHCTVITIAHRLHTIMDSDKVMVLDNGKIIEYGSPEELLQIPGPFYFMAKEAGIENVNSTKF

SEQ ID NO: 605 - protein, 8 aa, bacteriophage T7
DYKDDDDK

SEQ ID NO: 606 - DNA, 733 bp, homo sapiens
gggatccggagcccaaatcttctgacaaaactcacacatgcccaccgtgcccagcacctgaattcgagggtgcaccgtcagtcttcctcttccccccaaaacccaaggacaccctcatgatctcccggactcctgaggtcacatgcgtggtggtggacgtaagccacgaagaccctgaggtcaagttcaactggtacgtggacggcgtggaggtgcataatgccaagacaaagccgcgggaggagcagtacaacagcacgtaccgtgtggtcagcgtcctcaccgtcctgcaccaggactggctgaatggcaaggagtacaagtgcaaggtctccaacaaagccctcccaacccccatcgagaaaaccatctccaaagccaaagggcagccccgagaaccacaggtgtacaccctgcccccatcccgggatgagctgaccaagaaccaggtcagcctgacctgcctggtcaaaggcttctatccaagcgacatcgccgtggagtgggagagcaatgggcagccggagaacaactacaagaccacgcctcccgtgctggactccgacggctccttcttcctctacagcaagctcaccgtggacaagagcaggtggcagcaggggaacgtcttctcatgctccgtgatgcatgaggctctgcacaaccactacacgcagaagagcctctccctgtctccgggtaaatgagtgcgacggccgcgactctagaggat

SEQ ID NO: 607 - DNA, 34 bp, Homo sapiens
gcagcagcggccgcactgagatagtgggaaaagg

SEQ ID NO: 608 - DNA, 37 bp, Homo sapiens
gcagcagtcgacttaacaatgtgtttcactatctgcc

SEQ ID NO: 609 - DNA, 35 bp, Homo sapiens
gcagcagcggccgcatggaccaaaatcaacatttg

SEQ ID NO: 610 - DNA, 37 bp, Homo sapiens
gcagcagtcgactatacacgttgtatcaatcagagcc

SEQ ID NO: 611 - DNA, 18 bp, Bacteriophage M13
tgtaaaacgacggccagt

SEQ ID NO: 612 - DNA, 18 bp, Bacteriophage M13
caggaaacagctatgacc

SEQ ID NO: 613 - DNA, 21 bp, Homo sapiens
ttcagatggacaaaatttgca

SEQ ID NO: 614 - DNA, 21 bp, Homo sapiens
aaaacacatgctgggaaattg

SEQ ID NO: 615 - DNA, 24 bp, Homo sapiens
cagtaatttatgtctttgtgggcc

SEQ ID NO: 616 - DNA, 24 bp, Bacteriophage M13
agcggataacaatttcacacagga

SEQ ID NO: 617 - DNA, 28 bp, Homo sapiens
cagaaaattcaacatcaaccttatccac

SEQ ID NO: 618 - DNA, 24 bp, Bacteriophage M13
cgccagggttttcccagtcacgac

SEQ ID NO: 619 - DNA, 28 bp, Homo sapiens
gtcttttaagttgtagttggaataggtg

SEQ ID NO: 620 - DNA, 30 bp, Homo sapiens
tgctaatgaatatcacaacaatttttagag

SEQ ID NO: 621 - DNA, 28 bp, Homo sapiens
ggtgatgctctattgagtgataaaattt

SEQ ID NO: 622 - DNA, 26 bp, Homo sapiens
ttttgaataaggagaggaaagtaaaa

SEQ ID NO: 623 - DNA, 25 bp, Homo sapiens
gacatcacagcagtaaaacatgaga

SEQ ID NO: 624 - DNA, 23 bp, Homo sapiens
cccaatggtactatgggagtctc

SEQ ID NO: 625 - DNA, 30 bp, Homo sapiens
cattacctaaatacaaagaagaatgtcctt

SEQ ID NO: 626 - DNA, 21 bp, Homo sapiens
ctcacctgttggaggtgatcc

SEQ ID NO: 627 - DNA, 21 bp, Homo sapiens
attttccatttctcccagcat

SEQ ID NO: 628 - DNA, 21 bp, Homo sapiens
tgcatgaagttggtcacatcc

SEQ ID NO: 629 - DNA, 24 bp, Homo sapiens
tcgaccttatccacttgtttaatt

SEQ ID NO: 630 - DNA, 32 bp, Homo sapiens
gtgatgttcttacagttacaggtattctaaag

SEQ ID NO: 631 - DNA, 27 bp, Homo sapiens
gaataacttacatctcaccctgtctag

SEQ ID NO: 632 - DNA, 27 bp, Homo sapiens
aggagtcataaccatacctatttttgc

SEQ ID NO: 633 - DNA, 25 bp, Homo sapiens
cataggttgtttaaaggaatctggg

SEQ ID NO: 634 - DNA, 24 bp, Homo sapiens
tgggtaatatgcttcgtggaatag

SEQ ID NO: 635 - DNA, 23 bp, Homo sapiens
gtatcaggtttgccagttatccg

SEQ ID NO: 636 - DNA, 25 bp, Homo sapiens
ctttcagtgtgaacctggacattat

SEQ ID NO: 637 - DNA, 27 bp, Homo sapiens
cctaatttcaatccttatctttaggca

SEQ ID NO: 638 - DNA, 25 bp, Homo sapiens
ttcttaccttttcccactatctcag

SEQ ID NO: 639 - DNA, 25 bp, Homo sapiens
gtcgatgttgaattttctgatgaat

SEQ ID NO: 640 - DNA, 25 bp, Homo sapiens
tttattgccacttgaagatttgcaa

SEQ ID NO: 641 - DNA, 25 bp, Homo sapiens
tggcaattccaacggtgttcagttt

SEQ ID NO: 642 - DNA, 25 bp, Homo sapiens
aaatcatcaatgtaagaaagcccca

SEQ ID NO: 643 - DNA, 25 bp, Homo sapiens
acatttctggttggtgtcaatcctc

SEQ ID NO: 644 - DNA, 27 bp, Homo sapiens
  misc_feature (11)..(11): wherein "n" equals a C3 phosphoramidite linker.
ttatggcaggncaacttgtggctgtga

SEQ ID NO: 645 - DNA, 25 bp, Homo sapiens
gacatcaggttcactgtttctccaa

SEQ ID NO: 646 - DNA, 39 bp, Homo sapiens
tgtaaaacgacggccagtctgtgttgttaatgggcgaac

SEQ ID NO: 647 - DNA, 39 bp, Homo sapiens; identical to SEQ ID NO: 646

SEQ ID NO: 648 - DNA, 39 bp, Homo sapiens
tgtaaaacgacggccagtggccctgttcaatccaaatat

SEQ ID NO: 649 - DNA, 39 bp, Homo sapiens; identical to SEQ ID NO: 648

SEQ ID NO: 650 - DNA, 39 bp, Homo sapiens
tgtaaaacgacggccagtgaatttgttacagggctgcct

SEQ ID NO: 651 - DNA, 39 bp, Homo sapiens; identical to SEQ ID NO: 650

SEQ ID NO: 652 - DNA, 41 bp, Homo sapiens
tgtaaaacgacggccagtgctcctcctttttaacctctacc

SEQ ID NO: 653 - DNA, 39 bp, Homo sapiens; identical to SEQ ID NO: 646

SEQ ID NO: 654 - DNA, 39 bp, Homo sapiens; identical to SEQ ID NO: 646

SEQ ID NO: 655 - DNA, 39 bp, Homo sapiens
tgtaaaacgacggccagtggctcttctactcccagaagg

SEQ ID NO: 656 - DNA, 39 bp, Homo sapiens
tgtaaaacgacggccagtacctgaggctcttctactccc

SEQ ID NO: 657 - DNA, 40 bp, Homo sapiens
tgtaaaacgacggccagttccttgaatcacagtttcttcg

SEQ ID NO: 658 - DNA, 39 bp, Homo sapiens
tgtaaaacgacggccagtcgtgatcaatccaaaaccaaa

SEQ ID NO: 659 - DNA, 43 bp, Homo sapiens
tgtaaaacgacggccagttcagtatcacaaagtgagtctcaag

SEQ ID NO: 660 - DNA, 43 bp, Homo sapiens; identical to SEQ ID NO: 659

SEQ ID NO: 661 - DNA, 43 bp, Homo sapiens; identical to SEQ ID NO: 659

SEQ ID NO: 662 - DNA, 43 bp, Homo sapiens; identical to SEQ ID NO: 659

SEQ ID NO: 663 - DNA, 43 bp, Homo sapiens; identical to SEQ ID NO: 659

SEQ ID NO: 664 - DNA, 40 bp, Homo sapiens
tgtaaaacgacggccagtcagtacccctgacctctacctt

SEQ ID NO: 665 - DNA, 39 bp, Homo sapiens
tgtaaaacgacggccagtcagggtttctgaacatcctca

SEQ ID NO: 666 - DNA, 39 bp, Homo sapiens
tgtaaaacgacggccagtttcatcttgagagaggggagg

SEQ ID NO: 667 - DNA, 39 bp, Homo sapiens
tgtaaaacgacggccagttccctgagctgttattggaga

SEQ ID NO: 668 - DNA, 41 bp, Homo sapiens
tgtaaaacgacggccagtcatcacacccatcacaataacag

SEQ ID NO: 669 - DNA, 39 bp, Homo sapiens
tgtaaaacgacggccagtcctgctagacagggtgagatg

SEQ ID NO: 670 - DNA, 45 bp, Homo sapiens
tgtaaaacgacggccagtgaaagtttagttaaaattgttttctgc

SEQ ID NO: 671 - DNA, 39 bp, Homo sapiens
tgtaaaacgacggccagtcaaacccatcataggtcatgg

SEQ ID NO: 672 - DNA, 39 bp, Homo sapiens
tgtaaaacgacggccagtattccaacggtgttcagtttg

SEQ ID NO: 673 - DNA, 39 bp, Homo sapiens
tgtaaaacgacggccagtgggcgattcttttacaactga

SEQ ID NO: 674 - DNA, 42 bp, Homo sapiens
tgtaaaacgacggccagtgacaaagggaaagtgatcatacaa

SEQ ID NO: 675 - DNA, 39 bp, Homo sapiens
tgtaaaacgacggccagttagatgccaagaatgcatggt

SEQ ID NO: 676 - DNA, 39 bp, Homo sapiens; identical to SEQ ID NO: 675

SEQ ID NO: 677 - DNA, 39 bp, Homo sapiens
tgtaaaacgacggccagtttggaccaagctcatgaaaat

SEQ ID NO: 678 - DNA, 39 bp, Homo sapiens
tgtaaaacgacggccagtgcccactggaaacttaacaca

SEQ ID NO: 679 - DNA, 39 bp, Homo sapiens
tgtaaaacgacggccagtttgacaatcacagcttgcaaa

SEQ ID NO: 680 - DNA, 39 bp, Homo sapiens; identical to SEQ ID NO: 679

SEQ ID NO: 681 - DNA, 39 bp, Homo sapiens
tgtaaaacgacggccagtccaagctagacttcaggcctt

SEQ ID NO: 682 - DNA, 39 bp, Homo sapiens
tgtaaaacgacggccagtatttcacaccactagccatgc

SEQ ID NO: 683 - DNA, 39 bp, Homo sapiens
tgtaaaacgacggccagtacagctgcggtaagtctgtgt

SEQ ID NO: 684 - DNA, 39 bp, Homo sapiens
tgtaaaacgacggccagtgcaacgctaaagaatcgtctg

SEQ ID NO: 685 - DNA, 39 bp, Homo sapiens
tgtaaaacgacggccagttggaattgacagtgctgactg

SEQ ID NO: 686 - DNA, 39 bp, Homo sapiens; identical to SEQ ID NO: 685

SEQ ID NO: 687 - DNA, 39 bp, Homo sapiens
tgtaaaacgacggccagttaaaccttctgccatcaggtg

SEQ ID NO: 688 - DNA, 39 bp, Homo sapiens
tgtaaaacgacggccagtgttcgttttcatttgcgtgat

SEQ ID NO: 689 - DNA, 39 bp, Homo sapiens; identical to SEQ ID NO: 688

SEQ ID NO: 690 - DNA, 39 bp, Homo sapiens
tgtaaaacgacggccagttgaggctcaggacagttagga

SEQ ID NO: 691 - DNA, 39 bp, Homo sapiens; identical to SEQ ID NO: 682

SEQ ID NO: 692 - DNA, 39 bp, Homo sapiens
tgtaaaacgacggccagtatttgcaaaggacagaggaca

SEQ ID NO: 693 - DNA, 39 bp, Homo sapiens
tgtaaaacgacggccagtcacagcctctgctaacaggtt

SEQ ID NO: 694 - DNA, 39 bp, Homo sapiens
tgtaaaacgacggccagtaaatttgtttcaccccattcc

SEQ ID NO: 695 - DNA, 39 bp, Homo sapiens
tgtaaaacgacggccagttaatggaggtgaaggcctttt

SEQ ID NO: 696 - DNA, 39 bp, Homo sapiens
tgtaaaacgacggccagtaagccagattccaatgttcct

SEQ ID NO: 697 - DNA, 39 bp, Homo sapiens
tgtaaaacgacggccagtatccacaatctgcacacacaa

SEQ ID NO: 698 - DNA, 39 bp, Homo sapiens
tgtaaaacgacggccagtttcgacgaaagctgttctctc

SEQ ID NO: 699 - DNA, 39 bp, Homo sapiens; identical to SEQ ID NO: 698

SEQ ID NO: 700 - DNA, 39 bp, Homo sapiens
tgtaaaacgacggccagtttctggttcttgttggtgacc

SEQ ID NO: 701 - DNA, 39 bp, Homo sapiens
tgtaaaacgacggccagtgatgcactctcgaaggagttg

SEQ ID NO: 702 - DNA, 39 bp, Homo sapiens
tgtaaaacgacggccagtccaatccttcctgataccaca

SEQ ID NO: 703 - DNA, 39 bp, Homo sapiens
tgtaaaacgacggccagtactagccctcagtgccttctc

SEQ ID NO: 704 - DNA, 39 bp, Homo sapiens
tgtaaaacgacggccagtcttggtggacagtatcgcatt

SEQ ID NO: 705 - DNA, 39 bp, Homo sapiens
tgtaaaacgacggccagtggtcccaactctctccatagg

SEQ ID NO: 706 - DNA, 39 bp, Homo sapiens
tgtaaaacgacggccagtagttctgctgggagctcttct

SEQ ID NO: 707 - DNA, 39 bp, Homo sapiens
tgtaaaacgacggccagtctaatcgtcatgggggttctt

SEQ ID NO: 708 - DNA, 39 bp, Homo sapiens; identical to SEQ ID NO: 707

SEQ ID NO: 709 - DNA, 39 bp, Homo sapiens; identical to SEQ ID NO: 707

SEQ ID NO: 710 - DNA, 39 bp, Homo sapiens
tgtaaaacgacggccagtgaaattggaaagtgccacaga

SEQ ID NO: 711 - DNA, 39 bp, Homo sapiens
tgtaaaacgacggccagtgcccaggcatagagtttcaat

SEQ ID NO: 712 - DNA, 39 bp, Homo sapiens
tgtaaaacgacggccagtgttgtgccactggtgtttctt

SEQ ID NO: 713 - DNA, 39 bp, Homo sapiens
tgtaaaacgacggccagtacttgtgcccaggacataatg

SEQ ID NO: 714 - DNA, 39 bp, Homo sapiens
tgtaaaacgacggccagttccctcaatctccaggattct

SEQ ID NO: 715 - DNA, 39 bp, Homo sapiens
caggaaacagctatgaccatggtgcaaataaaggggaat

SEQ ID NO: 716 - DNA, 39 bp, Homo sapiens; identical to SEQ ID NO: 715

SEQ ID NO: 717 - DNA, 39 bp, Homo sapiens
caggaaacagctatgaccgcatcacctgagatagtggga

SEQ ID NO: 718 - DNA, 39 bp, Homo sapiens; identical to SEQ ID NO: 717

SEQ ID NO: 719 - DNA, 39 bp, Homo sapiens; identical to SEQ ID NO: 717

SEQ ID NO: 720 - DNA, 39 bp, Homo sapiens; identical to SEQ ID NO: 717

SEQ ID NO: 721 - DNA, 39 bp, Homo sapiens
caggaaacagctatgaccgtttccaaacagcattgcatt

SEQ ID NO: 722 - DNA, 39 bp, Homo sapiens; identical to SEQ ID NO: 715

SEQ ID NO: 723 - DNA, 39 bp, Homo sapiens; identical to SEQ ID NO: 715

SEQ ID NO: 724 - DNA, 39 bp, Homo sapiens
caggaaacagctatgacctggcaactggagtgaactctt

SEQ ID NO: 725 - DNA, 39 bp, Homo sapiens; identical to SEQ ID NO: 724

SEQ ID NO: 726 - DNA, 39 bp, Homo sapiens
caggaaacagctatgacctggggctctgattgatacaac

SEQ ID NO: 727 - DNA, 39 bp, Homo sapiens
caggaaacagctatgacctaaaacagcagaggcacaacc

SEQ ID NO: 728 - DNA, 43 bp, Homo sapiens
caggaaacagctatgaccgaaaagcaagttgttaaaaagaaca

SEQ ID NO: 729 - DNA, 43 bp, Homo sapiens; identical to SEQ ID NO: 728

SEQ ID NO: 730 - DNA, 43 bp, Homo sapiens; identical to SEQ ID NO: 728

SEQ ID NO: 731 - DNA, 43 bp, Homo sapiens; identical to SEQ ID NO: 728

SEQ ID NO: 732 - DNA, 43 bp, Homo sapiens; identical to SEQ ID NO: 728

SEQ ID NO: 733 - DNA, 39 bp, Homo sapiens
caggaaacagctatgaccgcagctctgtcactcagcttt

SEQ ID NO: 734 - DNA, 40 bp, Homo sapiens
caggaaacagctatgacctcttgttggttttattgacgga

SEQ ID NO: 735 - DNA, 39 bp, Homo sapiens
caggaaacagctatgaccttgacggaagctttgaaattg

SEQ ID NO: 736 - DNA, 40 bp, Homo sapiens
caggaaacagctatgaccttgtggttgtcataactgcaca

SEQ ID NO: 737 - DNA, 39 bp, Homo sapiens
caggaaacagctatgacctctcctccccttctttgtctt

SEQ ID NO: 738 - DNA, 39 bp, Homo sapiens
caggaaacagctatgacccatttcgtcatcatcaaagca

SEQ ID NO: 739 - DNA, 46 bp, Homo sapiens
caggaaacagctatgaccttgacatacattgtgtttcatctataaa

SEQ ID NO: 740 - DNA, 46 bp, Homo sapiens; identical to SEQ ID NO: 739

SEQ ID NO: 741 - DNA, 38 bp, Homo sapiens
caggaaacagctatgaccgaagcaaggggaggaagaac

SEQ ID NO: 742 - DNA, 39 bp, Homo sapiens
caggaaacagctatgaccgcccaagagatgatgcttgta

SEQ ID NO: 743 - DNA, 39 bp, Homo sapiens
caggaaacagctatgaccttgtcaaagtttgcaaagtga

SEQ ID NO: 744 - DNA, 47 bp, Homo sapiens
caggaaacagctatgaccaaaattaatgtttaaaatgaaacactctc

SEQ ID NO: 745 - DNA, 46 bp, Homo sapiens
caggaaacagctatgacctgaaacactctcttatctacataggttg

SEQ ID NO: 746 - DNA, 39 bp, Homo sapiens
caggaaacagctatgacctaagaaccatgcattcttggc

SEQ ID NO: 747 - DNA, 41 bp, Homo sapiens
caggaaacagctatgaccggtagaggttaaaaaggaggagc

SEQ ID NO: 748 - DNA, 42 bp, Homo sapiens
caggaaacagctatgaccaaagtgagagacatggttactgtg

SEQ ID NO: 749 - DNA, 42 bp, Homo sapiens; identical to SEQ ID NO: 748

SEQ ID NO: 750 - DNA, 39 bp, Homo sapiens
caggaaacagctatgacctttgaggagttcctggtcctt

SEQ ID NO: 751 - DNA, 39 bp, Homo sapiens
caggaaacagctatgaccagaaaggaggaagatggtgga

SEQ ID NO: 752 - DNA, 39 bp, Homo sapiens
caggaaacagctatgaccctcatcttgtctccttgccag

SEQ ID NO: 753 - DNA, 39 bp, Homo sapiens
caggaaacagctatgacccctcacaaactgcctcttcag

SEQ ID NO: 754 - DNA, 39 bp, Homo sapiens
caggaaacagctatgacccactgcctcttacctcctgtg

SEQ ID NO: 755 - DNA, 39 bp, Homo sapiens; identical to SEQ ID NO: 754

SEQ ID NO: 756 - DNA, 39 bp, Homo sapiens
caggaaacagctatgaccgggggttttgaaagtctgatc

SEQ ID NO: 757 - DNA, 39 bp, Homo sapiens
caggaaacagctatgaccaaatccaagatcctggtcctg

SEQ ID NO: 758 - DNA, 39 bp, Homo sapiens
caggaaacagctatgaccctgcggtggatctagagacag

SEQ ID NO: 759 - DNA, 39 bp, Homo sapiens
caggaaacagctatgacccactgcacagtgatcaccatc

SEQ ID NO: 760 - DNA, 39 bp, Homo sapiens; identical to SEQ ID NO: 751

SEQ ID NO: 761 - DNA, 39 bp, Homo sapiens
caggaaacagctatgaccatctgcttgcaagaagaccct

SEQ ID NO: 762 - DNA, 39 bp, Homo sapiens; identical to SEQ ID NO: 761

SEQ ID NO: 763 - DNA, 39 bp, Homo sapiens
caggaaacagctatgacctcactgcataccgtttttcct

SEQ ID NO: 764 - DNA, 39 bp, Homo sapiens
caggaaacagctatgacctgtggtatcaggaaggattgg

SEQ ID NO: 765 - DNA, 39 bp, Homo sapiens
caggaaacagctatgaccattctcactgcctggcctatt

SEQ ID NO: 766 - DNA, 39 bp, Homo sapiens
caggaaacagctatgacccagttttctgaggcctccttt

SEQ ID NO: 767 - DNA, 39 bp, Homo sapiens
caggaaacagctatgaccaaaggaacctgggcatttcta

SEQ ID NO: 768 - DNA, 39 bp, Homo sapiens; identical to SEQ ID NO: 767

SEQ ID NO: 769 - DNA, 39 bp, Homo sapiens
caggaaacagctatgaccggcctcttgtactttgggaac

SEQ ID NO: 770 - DNA, 39 bp, Homo sapiens
caggaaacagctatgacccgcgtgagcacctaattagtc

SEQ ID NO: 771 - DNA, 39 bp, Homo sapiens
caggaaacagctatgaccgggaaccttcattcagagacc

SEQ ID NO: 772 - DNA, 39 bp, Homo sapiens
caggaaacagctatgacctccaatcttgaggggaaatct

SEQ ID NO: 773 - DNA, 39 bp, Homo sapiens
caggaaacagctatgaccggagcacatccttccattgta

SEQ ID NO: 774 - DNA, 39 bp, Homo sapiens
caggaaacagctatgacctgggtagagttggaggaaggt

SEQ ID NO: 775 - DNA, 39 bp, Homo sapiens
caggaaacagctatgaccagctgtcttccccttctcttg

SEQ ID NO: 776 - DNA, 39 bp, Homo sapiens
caggaaacagctatgacccaccatcatcgtcattcctct

SEQ ID NO: 777 - DNA, 39 bp, Homo sapiens; identical to SEQ ID NO: 776

SEQ ID NO: 778 - DNA, 39 bp, Homo sapiens; identical to SEQ ID NO: 776

SEQ ID NO: 779 - DNA, 39 bp, Homo sapiens
caggaaacagctatgaccagtgtggtccatggagatgag

SEQ ID NO: 780 - DNA, 39 bp, Homo sapiens
caggaaacagctatgaccagcatgcactttcttcctcaa

SEQ ID NO: 781 - DNA, 39 bp, Homo sapiens
caggaaacagctatgaccggacaagatagaacttgggcc

SEQ ID NO: 782 - DNA, 39 bp, Homo sapiens
caggaaacagctatgaccctccttgtggttggcattcta

SEQ ID NO: 783 - DNA, 39 bp, Homo sapiens
caggaaacagctatgaccatttctggagtgcctttggtt
